(19) United States
(12) Patent Application Publication
(10) Pub. No.: US 2008/0300202 A1
(43) Pub. Date: Dec. 4, 2008

(54) SUBTRACTIVE TRANSGENICS

(75) Inventor: Clifford Kentros, Eugene, OR (US)

Correspondence Address: KLARQUIST SPARKMAN, LLP, 121 SW SALMON STREET, SUITE 1600, PORTLAND, OR, 97204, US

(73) Assignees: The State of Oregon acting by and through the State Board of Higher Education on behalf of the; University of Oregon

(21) Appl. No.: 11/750,971

(22) Filed: May 18, 2007

Related U.S. Application Data
(60) Provisional application No. 60/801,692, filed on May 18, 2006.

(51) Int. Cl. A61K 31/70; A01K 67/027; C12N 15/00; A61P 43/00; C12N 5/06

(52) U.S. Cl. 514/44; 800/13; 435/325; 800/22; 435/320.1

(57) ABSTRACT

Described herein are methods for predictable, highly selective expression of a transgene in a human or non-human animal. The methods comprise subtractive transgenics, wherein the expression pattern of one selective promoter is subtracted from the expression pattern of a second selective promoter. Provided are non-human transgenic animals exhibiting a highly selective expression pattern and methods of producing such animals. Further provided are methods of selective expression of a transgene in an animal, including a human, by administration of viral vectors.

### CROSS REFERENCE TO RELATED APPLICATION

[0001] This application claims the benefit of priority of U.S. Provisional Application Ser. No. 60/801,692, filed May 18, 2006, which is herein incorporated by reference.

### STATEMENT OF GOVERNMENT SUPPORT

[0002] This invention was made with United States government support pursuant to grant #DAMD17-01-1-0750, from the Department of Defense; the United States government has certain rights in the invention.

### FIELD

[0003] This disclosure relates to a method for predictable, highly selective expression of a transgene in a human or non-human animal. The disclosure further relates to non-human transgenic animals exhibiting a highly selective expression pattern and methods of producing such animals.

### BACKGROUND

[0004] Selective expression of a gene or transgene in particular cell populations is valuable for a number of research and therapeutic applications. The cloning and use of native promoters to direct expression of a gene in a selected cell type has been well described. However, native promoters often do not provide the level of selectivity required.

[0005] Previous studies have described conditional and inducible transgene expression through the combined use of Cre-mediated recombination and the tetracycline-dependent expression system (Belteki et al. Nucl. Acids Res. 33(5):e51, 2005; Ivy Yu et al. Proc. Natl. Acad. Sci. U.S.A. 102(24):8615-8620, 2005). The Cre-loxP system allows for the permanent activation or deactivation of genes in a particular cell lineage. The tetracycline-dependent system permits temporal and cell-type specific control of transgene expression. However, even with the combination of these two systems, transgene expression is only as specific as the promoter used to drive expression of the Cre recombinase.

[0006] Thus, provided herein is a method for the predictable, highly selective expression of a transgene using subtractive transgenics. As described herein, subtractive transgenics involves the use of two different selective promoters, wherein the expression pattern of one promoter is subtracted from the expression pattern of a second promoter to enable specificity of transgene expression in a sub-population of cells.

### SUMMARY

[0007] Described herein are methods of subtractive transgenics, wherein the expression pattern of one selective promoter is subtracted from the expression pattern of a second selective promoter. Provided herein is a transgenic non-human animal comprising (a) a first heterologous nucleic acid encoding a recombinase operably linked to a first selective promoter; (b) a second heterologous nucleic acid encoding a transcription factor operably linked to a second selective promoter, wherein expression of the transcription factor is regulated by expression of the recombinase; and (c) a third heterologous nucleic acid comprising a transgene under the transcriptional control of a response element specific for the transcription factor. In one embodiment, in the transgenic non-human animal the recombinase is expressed in a first population of cells and the transcription factor is expressed in a second population of cells, wherein the first and second populations of cells comprise at least one overlapping sub-population of cells and at least one non-overlapping sub-population of cells. In one embodiment, the first and/or second selective promoter comprises a tissue specific promoter. In another embodiment, the first and/or second selective promoter comprises a temporally specific promoter. In another embodiment, the first and/or second selective promoter comprises an inducible promoter.

[0008] Further provided is a method of producing a non-human animal that expresses a transgene in a selected population, or sub-population of cells, the method comprising identifying at least one progeny of a cross between (a) a first transgenic non-human animal comprising a first heterologous nucleic acid encoding a recombinase operably linked to a first selective promoter; (b) a second transgenic non-human animal comprising a second heterologous nucleic acid comprising a polynucleotide sequence that encodes a transcription factor operably linked to a second selective promoter, wherein the polynucleotide sequence is (i) flanked by recombinase recognition sites; or (ii) preceded by a transcription STOP signal flanked by recombinase recognition sites, wherein the at least one identified progeny comprises the first and second heterologous nucleic acids and wherein the at least one progeny further comprises a transgene under the transcription regulatory control of a response element specific for the transcription factor.

[0009] Also provided is a method for selective expression of a transgene in a population, or sub-population, of cells in an animal, comprising administering to the animal (a) a first viral vector comprising a nucleic acid encoding a recombinase operably linked to a nucleic acid encoding a first selective promoter; (b) a second viral vector comprising a nucleic acid encoding a transcription factor operably linked to a nucleic acid encoding a second selective promoter, wherein expression of the transcription factor is regulated by expression of the recombinase; and (c) a third viral vector comprising a transgene under the transcriptional control of a response element specific for the transcription factor. In some embodiments, the first, second and third viral vectors are independently selected from adenovirus vectors, adeno-associated virus vectors, lentivirus vectors, retrovirus vectors and herpesvirus vectors. In one embodiment, the transgene is a therapeutic molecule, a toxin or a maker protein.

[0010] Also provided herein are kits for subtractive transgenics. In one embodiment, the kit comprises (1) a first viral vector comprising a nucleic acid encoding a recombinase operably linked to a nucleic acid encoding a first selective promoter; (2) a second viral vector comprising a nucleic acid encoding a transcription factor operably linked to a nucleic acid encoding a second selective promoter; and (3) a third viral vector comprising a transgene under the transcriptional control of a response element specific for the transcription factor. In another embodiment, the kit comprises (1) a first injection construct comprising a nucleic acid encoding a recombinase operably linked to a first selective promoter; (2) a second injection construct comprising a nucleic acid encoding a transcription factor operably linked to a second selective promoter, wherein expression of the transcription factor is regulated by expression of the recombinase; and (3) a third injection construct comprising a transgene under the transcriptional control of a response element specific for the transcription factor.

[0011] The foregoing and other features and advantages will become more apparent from the following detailed description of several embodiments, which proceeds with reference to the accompanying figures.

### BRIEF DESCRIPTION OF THE FIGURES

[0012] FIG. 1A schematically illustrates tissue-specific knock-out of a target gene by Cre recombinase. A tissue-specific promoter (Promoter X) driving expression of the Cre recombinase mediates excision of a target gene flanked by loxp recognition sites. FIG. 1B schematically illustrates tissue-specific, inducible (by doxycycline) expression of a target gene under transcriptional control of the tetO operator. In the absence of doxycycline, tTA is capable of binding tetO, driving expression of the transgene. Expression of tTA is regulated by a tissue-specific promoter (Promoter X).

[0013] FIG. 2 schematically illustrates an example of “subtractive transgenics.” In this example, promoter “ABCD” drives expression of tTA in cell types A, B, C and D. Promoter “BCD” drives expression of Cre in cell types B, C and D. Where expression overlaps (cell types B, C and D), Cre will excise tTA through recognition of the flanking loxp sites. Therefore, tTA will be expressed only in cell type A.

[0014] FIG. 3 schematically illustrates the expression patterns of a transgene in subtractive transgenic animals using the ftTA (A) and fSTOP-tTA (B) strategies.

[0015] FIG. 4 schematically illustrates the CamKIIα-ftTA construct (pMM403 backbone).

[0016] FIGS. 5A-C are images of in situ staining of subsets of neurons in strains of mice expressing tTA (A and C) and Cre (B and C) under the transcriptional control of the CamKIIα promoter. When both tTA and Cre are under the control of the same promoter (C), tTA (flanked by loxp sites) is not expressed.

[0017] FIG. 6 schematically illustrates a strategy for creating ftTA BAC vectors.

[0018] FIGS. 7A and B schematically illustrate transgenic BAC generation and selective expression, respectively.

[0019] FIGS. 8A and B schematically illustrate the strategy for PCR screening of native and recombinant BAC for Drd4 promoter constructs. For PCR specific for native BAC (FIG. 8A), both the forward primer (Drd4_{—}5′i) and reverse primer (Drd_gene_rev) are in the BAC vector. For PCR specific for recombinant BAC (FIG. 8B), the forward primer (Drd4_{—}5′i) is in the BAC and the reverse primer (pLD800_rev) is in the insert from the shuttle vector.

[0020] FIGS. 9A and B schematically illustrate the strategy for Southern blot identification of co-integrants. The Drd4_{—}5′ probe binds to a part of the BAC upstream of the A box. Both the native and recombinant BACs are subjected to XbaI digestion, which cuts the BAC at a point upstream of the binding site for the probe, and at a site that is downstream of the end point of the A box. The distance between the two sites is approximately 7.1 kb. If tTA is inserted homologously with the A boxes synchronizing between the BAC and the shuttle vector, then an extra XbaI site is introduced since it is present in the ftTA cassette, and the fragment that binds to the probe is shortened to 3.4 kb. The tTA probe binds to the ftTA inset from the recombination cassette, and therefore only to the recombinant BAC. In the native BAC (FIG. 9A), the Drd4_{—}5′ probe binds to the >7 kb band and the tTA will not bind. In the recombinant BAC (FIG. 9B), Drd4_{—}5′ will bind to the >3 kb band and tTA will bind to a band of variable size depending on the size of the insert recombined (>5 kb if at least part of the DNA up to the β-lactamase gene conferring Amp resistance has been inserted).

[0021] FIGS. 10A-C are images demonstrating hybridization of BAC DNA for characterization of recombination of the Drd4 constructs. FIG. 10A shows RNA-based screening of 40 potential colonies for recombination. All clones were identified as positive. FIG. 10B is an image of DIG-labeled screening of RP23-134L4-based recombination, hybridized with tTA (left) and with Drd4_{—}5′ (right). The left lane in both panels is the recombinant (R) and the right lane is the control (C). FIG. 10C is an image of DIG-labeled screening of sixteen colonies with Drd4_{—}5′, which shows recombination in all eleven RP23-320N24 colonies (˜3.4 kb band) and no recombination in any of the RP23-134L4 colonies (˜7.1 kb band).

[0022] FIGS. 11A-C illustrate the strategy for Southern blot identification of co-integrants for the ChAT promoter constructs. The ChAT_Abox probe binds to the A box. Both the native and recombinant BACs are subjected to XbaI digest, which cuts the BAC at a point upstream of the binding site for the probe, and at a site that is downstream of the end point of the A box. In the native BAC RP23-246B12 (FIG. 11A), the distance between the two sites is approximately 5.8 kb. If tTA is inserted homologously with the A boxes synchronizing between the BAC and the shuttle vector, an additional XbaI site is introduced since it is present in the ftTA cassette. Thus, the fragment binding to the probe is shortened to approximately 4.3 kb. In the recombinant BAC (FIG. 11B), the ChAT_Abox probe binds to the (approximately) 4.3 kb band and also to the (approximately) 6.2 kb band as the whole shuttle vector sequence is repeated in reverse. The recombinant shows binding of probe to 4.3 kb and 6.2 kb bands, as opposed to 5.8 kb for the native BAC. Drd4 ftTA does not bind to the probe since it doesn't contain the ChAT A box sequence (FIG. 11C).

[0023] FIG. 12 is a map of the pBS_CALB_tTA injection construct (SEQ ID NO: 24).

[0024] FIG. 13 is a map of the pBS_CALB_fSTOPtTA injection construct (SEQ ID NO: 25).

[0025] FIG. 14 is a map of the pBS_CCK-fTA injection construct (SEQ ID NO: 26).

[0026] FIG. 15 is a map of the pBS_CCK-fSTOPtTA injection construct (SEQ ID NO: 27).

[0027] FIGS. 16A-E are images of immunohistochemical staining of hippocampal sections from transgenic mouse lines expressing tTA and/or Cre under the transcriptional control of CamKIIα. The genotype of each mouse is shown in the upper left of each image. FIG. 16A is a hippocampal section from an unsubtracted mouse (ftTA⁺/Cre⁻) showing detection of tTA expression in all primary neurons (CA1, CA3, gc and hilus). FIG. 16B is a hippocampal section from a subtracted mouse (ftTA⁺/Cre⁺) in which Cre is expressed only in CA3 neurons. In the same subtracted mouse, tTA expression is observed in CA1, gc and hilus (all primary neurons except CA3). FIG. 16D and FIG. 16E are higher magnification images of tTA expression in the CA3/hilar area in the unsubtracted line and the subtracted line, respectively. The caret indicates the CA2/CA3 boundary. tTA expression was detected using an anti-tTA primary antibody (VP16, Chemicon). Cre expression was detected using an anti-Cre primary antibody (Novagen). An HRP-linked (Chemicon) secondary antibody was used to catalyze the diaminobenzidine (DAB) reaction.

### SEQUENCE LISTING

[0028] The nucleic and amino acid sequences listed in the accompanying sequence listing are shown using standard letter abbreviations for nucleotide bases, and three letter code for amino acids, as defined in 37 C.F.R. 1.822. Only one strand of each nucleic acid sequence is shown, but the complementary strand is understood as included by any reference to the displayed strand. In the accompanying sequence listing:

[0029] SEQ ID NO: 1 is the nucleotide sequence of primer DrdABox5′Asc.

[0030] SEQ ID NO: 2 is the nucleotide sequence of primer DrdABox3′Fse.

[0031] SEQ ID NO: 3 is the nucleotide sequence of the loxP1 oligonucleotide.

[0032] SEQ ID NO: 4 is the nucleotide sequence of the loxP1bis oligonucleotide.

[0033] SEQ ID NO: 5 is the nucleotide sequence of the loxP2 oligonucleotide.

[0034] SEQ ID NO: 6 is the nucleotide sequence of the loxP2bis oligonucleotide.

[0035] SEQ ID NO: 7 is the nucleotide sequence of primer T3.

[0036] SEQ ID NO: 8 is the nucleotide sequence of primer T7.

[0037] SEQ ID NO: 9 is the nucleotide sequence of primer RecA_{—}7023fwd.

[0038] SEQ ID NO: 10 is the nucleotide sequence of primer EGFP_{—}150rev.

[0039] SEQ ID NO: 11 is the nucleotide sequence of primer Drd4_{—}5′i.

[0040] SEQ ID NO: 12 is the nucleotide sequence of primer Drd4_gene_rev.

[0041] SEQ ID NO: 13 is the nucleotide sequence of primer pLD800_rev.

[0042] SEQ ID NOs: 14 and 15 are the nucleotide sequences of primers used to amplify segment A of the CCK promoter.

[0043] SEQ ID NOs: 16 and 17 are the nucleotide sequences of primers used to amplify segment B of the CCK promoter.

[0044] SEQ ID NOs: 18 and 19 are the nucleotide sequences of primers used to amplify segment C of the CCK promoter.

[0045] SEQ ID NOs: 20 and 21 are the nucleotide sequences of oligonucleotides used to modify the multiple cloning site of pBSKS+.

[0046] SEQ ID NO: 22 is the nucleotide sequence of the ChAT_ftTA injection construct.

[0047] SEQ ID NO: 23 is the nucleotide sequence of the Drd4_ftTA injection construct.

[0048] SEQ ID NO: 24 is the nucleotide sequence of the pBS_CALB_ftTA injection construct.

[0049] SEQ ID NO: 25 is the nucleotide sequence of the pBS_CALB_fSTOPtTA injection construct.

[0050] SEQ ID NO: 26 is the nucleotide sequence of the pBS_CCK_ftTA injection construct.

[0051] SEQ ID NO: 27 is the nucleotide sequence of the pBS_CCK_fSTOPtTA injection construct.

### DETAILED DESCRIPTION

### I. Abbreviations

[0052] AAV Adeno-associated virus

[0053] APP Amyloid precursor protein

[0054] BAC Bacterial artificial chromosome

[0055] CamKII Calcium-calmodulin-dependent protein kinase II

[0056] CBP Calcium binding protein

[0057] CCK Cholecystokinin

[0058] CD Cluster of differentiation

[0059] CHAT Choline acetyltransferase

[0060] CNS Central nervous system

[0061] CSD Current source density

[0062] DRD4 Dopamine receptor D4

[0063] ES Embryonic stem

[0064] GENSAT Gene Expression Nervous System Atlas

[0065] GFP Green fluorescent protein

[0066] HIV Human immunodeficiency virus

[0067] IRES Internal ribosomal entry site

[0068] NPY Neuropeptide Y

[0069] PFC Prefrontal cortex

[0070] SMT Somatostatin

[0071] tetO Tetracycline operator

[0072] VIP Vasoactive intestinal peptide

### II. Terms

[0073] Unless otherwise noted, technical terms are used according to conventional usage. Definitions of common terms in molecular biology may be found in Benjamin Lewin, Genes V, published by Oxford University Press, 1994 (ISBN 0-19-854287-9); Kendrew et al. (eds.), The Encyclopedia of Molecular Biology, published by Blackwell Science Ltd., 1994 (ISBN 0-632-02182-9); and Robert A. Meyers (ed.), Molecular Biology and Biotechnology: a Comprehensive Desk Reference, published by VCH Publishers, Inc., 1995 (ISBN 1-56081-569-8).

[0074] In order to facilitate review of the various embodiments of the disclosure, the following explanations of specific terms are provided:

[0075] Unless otherwise explained, all technical and scientific terms used herein have the same meaning as commonly understood by one of ordinary skill in the art to which this disclosure belongs. The singular terms “a,” “an,” and “the” include plural referents unless context clearly indicates otherwise. Similarly, the word “or” is intended to include “and” unless the context clearly indicates otherwise. Hence “comprising A or B” means including A, or B, or A and B. It is further to be understood that all base sizes or amino acid sizes, and all molecular weight or molecular mass values, given for nucleic acids or polypeptides are approximate, and are provided for description. Although methods and materials similar or equivalent to those described herein can be used in the practice or testing of the present disclosure, suitable methods and materials are described below. All publications, patent applications, patents, and other references mentioned herein are incorporated by reference in their entirety. In case of conflict, the present specification, including explanations of terms, will control. In addition, the materials, methods, and examples are illustrative only and not intended to be limiting.

[0076] Animal: Refers to a human or non-human organism. A non-human animal can be a vertebrate such as a fish, an amphibian, a reptile, a bird or a mammal. In some cases, the non-human animal is a rodent, such as a mouse. In other cases, the non-human animal is a domesticated livestock, such as a cow, a sheep, a goat, a pig or a horse. In other cases, the non-human animal is a non-human primate.

[0077] Apoptosis: A type of cell death in which a cell uses specialized cellular machinery to kill itself. Apoptosis is a cellular suicide mechanism which occurs during development and in response to specific external stimuli, such as infection or injury. As used herein, a “pro-apoptotic molecule” (such as a pro-apoptotic gene or protein) is a molecule that when expressed, promotes, enhances or increases apoptosis in a cell, or increases susceptibility of a cell to apoptosis. Pro-apoptotic molecules are well known in the art and include, for example, caspases, granzyme B, Fas/Fas ligand, Bcl-2 and Bcl-X (and related family members), ceramide, smac, tumor necrosis factor and death domain containing molecules.

[0078] Enabled: As used herein, “enabled” means made possible. Thus, expression is enabled by a molecule, event or occurrence, if the presence of the molecule, or the occurrence of the event makes expression possible. In contrast, the term “disabled” means to make incapable. Thus, expression is disabled by a molecule, event or occurrence, if the presence of the molecule or occurrence of the event eliminates or drastically reduces the capacity for expression.

[0079] Embryonic stem (ES) cells: Pluripotent cells isolated from the inner cell mass of the developing blastocyst. ES cells are pluripotent cells, meaning that they can generate all of the cells present in the body (bone, muscle, brain cells, etc.). Methods for producing murine ES cells can be found in U.S. Pat. No. 5,670,372, herein incorporated by reference. Methods for producing human ES cells can be found in U.S. Pat. No. 6,090,622, PCT Publication No. WO 00/70021 and PCT Publication No. WO 00/27995, herein incorporated by reference.

[0080] Excision: As used herein, “excision” means removal.

[0081] Expression: The transcription and/or translation of a product from a nucleic acid template. Thus, an organism “expresses” a transgene when at least a portion of the heterologous nucleic acid is transcribed and, in some instances, translated.

[0082] Expression control sequence: Includes nucleic acid sequences that regulate the expression of a nucleic acid sequence to which it is operably linked. A nucleic acid is operably linked to an expression control sequences when the expression control sequences control and regulate the transcription and, as appropriate, translation of the nucleic acid sequence. Thus, expression control sequences can include promoters, enhancers, transcription terminators, a start codon (typically, ATG) in front of a protein-encoding gene, splicing signal for introns, maintenance of the correct reading frame of that gene to permit proper translation of mRNA, and stop codons.

[0083] Expression vector: A vector is a nucleic acid molecule allowing insertion of foreign nucleic acid without disrupting the ability of the vector to replicate and/or integrate in a host cell. A vector can include nucleic acid sequences that permit it to replicate in a host cell, such as an origin of replication. A vector can also include one or more selectable marker genes and other genetic elements. An expression vector is a vector that contains the necessary regulatory sequences to allow transcription and translation of inserted gene or genes.

[0084] Flanks: As used herein, a first nucleotide sequence “flanks” a second nucleotide sequence if copies of the first nucleotide sequence are present (in any orientation or position) on both sides of the second nucleotide sequence. In which case, the second nucleotide sequence is said to be “flanked” by the first nucleotide sequence. In the context of this disclosure, for example, a polynucleotide sequence is flanked by a recognition site for a site-specific recombinase if a recognition site is present on both sides of the polynucleotide sequence.

[0085] Floxed: Refers to a nucleic acid that is flanked by loxP sites, which are recognition sites for Cre recombinase. In one embodiment, the “floxed” nucleic acid is a transactivator or transcription factor, such as tTA. In another embodiment, the “floxed” nucleic acid is a STOP signal.

[0086] Heterologous nucleic acid: A nucleic acid that does not originate in a particular cell or organism in nature. For example, a heterologous nucleic acid can be a nucleic acid that includes a polynucleotide sequence of a different organism or a recombinant, synthetic or artificial polynucleotide sequence. In the context of this disclosure a “transgene” is a heterologous nucleic acid.

[0087] Infective: A virus or vector is “infective” when it transduces a cell, replicates, and (without the benefit of any complementary virus or vector) spreads progeny vectors or viruses of the same type as the original transducing virus or vector to other cells in an organism or cell culture, where the progeny vectors or viruses have the same ability to reproduce and spread throughout the organism or cell culture.

[0088] Injection construct: A nucleic acid sequence suitable for injection into an oocyte, embryonic stem cell, or other appropriate cell type, for homologous recombination and/or the generation of a transgenic animal. In one embodiment, the injection construct comprises a heterologous nucleic acid, such as a nucleic acid encoding a recombinase or a transcription factor, and selective promoter.

[0089] Neural cell: Any cell in a lineage that originates with a neural stem cell and includes a mature neuron. Thus, the term neural cell includes neurons (nerve cells) as well as their progenitors regardless of their stage of differentiation. In the context of an adult brain, neural cells are predominantly differentiated neurons. In contrast, a “non-neural cell” is a cell of a lineage other than a neural cell lineage, that is, a lineage that does not culminate in the differentiation of a mature neuron. The non-neural cell may reside in the central nervous system (CNS), for example, in the brain (such as glial cells and immune system cells, such as B cells, dendritic cells, macrophages and microglia), or may exist in an organ outside the CNS, such as cardiac, skeletal or smooth muscle (a muscle cell), liver (a hepatic cell) or kidney (a renal cell) and so forth. Non-neural cells include cells of the immune system, regardless of whether they reside in the CNS or elsewhere in the body of the organism.

[0090] Operably linked: A first nucleic acid sequence is operably linked with a second nucleic acid sequence when the first nucleic acid sequence is placed in a functional relationship with the second nucleic acid sequence. For instance, a promoter is operably linked to a coding sequence if the promoter affects the transcription or expression of the coding sequence. Generally, operably linked DNA sequences are contiguous and, where necessary to join two protein-coding regions, in the same reading frame.

[0091] Pharmaceutically Acceptable Vehicle: The pharmaceutically acceptable carriers (vehicles) useful in this disclosure are conventional. Remington's Pharmaceutical Sciences, by E. W. Martin, Mack Publishing Co., Easton, Pa., 15th Edition (1975), describes compositions and formulations suitable for pharmaceutical delivery of one or more therapeutic compounds or molecules, such as one or more viral vectors and additional pharmaceutical agents.

[0092] In general, the nature of the carrier will depend on the particular mode of administration being employed. For instance, parenteral formulations usually comprise injectable fluids that include pharmaceutically and physiologically acceptable fluids such as water, physiological saline, balanced salt solutions, aqueous dextrose, glycerol or the like as a vehicle. For solid compositions (for example, powder, pill, tablet, or capsule forms), conventional non-toxic solid carriers can include, for example, pharmaceutical grades of mannitol, lactose, starch, or magnesium stearate. In addition to biologically-neutral carriers, pharmaceutical compositions to be administered can contain minor amounts of non-toxic auxiliary substances, such as wetting or emulsifying agents, preservatives, and pH buffering agents and the like, for example sodium acetate or sorbitan monolaurate.

[0093] Preventing, treating or ameliorating: “Preventing” a disease or condition refers to inhibiting the full development of a disease or condition. “Treating” refers to a therapeutic intervention that ameliorates a sign or symptom of a disease or pathological condition after it has begun to develop. “Ameliorating” refers to the reduction in the number or severity of signs or symptoms, or the duration, of a disease or condition.

[0094] Population: As used herein, a “population” or “set” of cells refers to any identifiable plurality of cells. A population of cells can include one or more cell types, and/or can include functionally or spatially related cells or cells that are related by lineage or involvement in a cellular pathway. A “sub-population” or “subset” of cells refers to an identifiable group of cells (or cell types) within a population. An “overlapping” sub-population of cells is a group of cells (or cell types) that share at least one common feature between two or more populations of cells.

[0095] Promoter: A sequence sufficient to direct transcription, and which may optionally include additional polynucleotide sequences. In some cases the promoter is a selective promoter capable of rendering promoter-dependent gene expression, for instance which is selective for a specific cell-type, a specific tissue, or a specific time point during development or differentiation. Selective promoters can also be inducible by external signals or agents (that is, “inducing agents”). Selective promoters can modulate anatomical, cell, tissue, temporal and/or spatial expression of a nucleic acid, such as a transgene.

[0096] Recombinant: A recombinant nucleic acid is one that has a sequence that is not naturally occurring or has a sequence that is made by an artificial combination of two otherwise separated segments of sequence. This artificial combination is often accomplished by chemical synthesis or, more commonly, by the artificial manipulation of isolated segments of nucleic acids, e.g., by genetic engineering techniques, such as those described in Sambrook et al. (ed.), Molecular Cloning: A Laboratory Manual, 2^{nd} ed., vol. 1-3, Cold Spring Harbor Laboratory Press, Cold Spring Harbor, N.Y., 1989. The term recombinant includes nucleic acids that have been altered by addition, substitution, or deletion of a portion of the nucleic acid.

[0097] Recombinase: Any polypeptide that mediates in whole or in part the process of nucleic acid recombination. A “site specific” recombinase is a recombinase that mediates recombination of a nucleic acid that possesses particular nucleotide binding sites, termed “recognition sites.” Examples of site specific recombinases and their corresponding recognition sites include the Cre recombinase and corresponding loxP recognition sites, flp recombinase and corresponding FRT recognition sites, and the bacterial β-recombinases and their corresponding recognition sites.

[0098] Silencer: As used herein, a silencer construct is a construct that “turns off,” or inhibits the activity of cells, such as toxins, dominant negative constructs, and inhibitory RNA molecules. Generally, silencers are capable of reducing a cell's response to a stimulus or stimuli.

[0099] Specified: As used herein, “specified” with respect to a cell indicates that the cell is of an identifiable lineage and/or phenotype and/or population that can be determined with reliability by a practitioner of ordinary skill in the art.

[0100] Subtractive transgenics: Describes methods wherein predictable, highly selective expression of a transgene can be achieved by subtracting the expression pattern of one promoter from the expression pattern of a different promoter.

[0101] Target nucleic acid: As used herein, a “target nucleic acid” is a heterologous nucleic acid with a functional attribute of interest that is subject to inducible transcriptional control by one or more specified control factors. Also referred to herein as a “transgene.”

[0102] Therapeutic molecule: As used herein, a “therapeutic molecule” (such as a therapeutic gene or protein) can be any molecule that prevents, treats or ameliorates a disease, condition or disorder (such as a genetic disorder, infection or cancer) when expressed in a selected population or sub-population of cells. In one embodiment, a therapeutic molecule is a wild-type version of a mutated gene or protein involved in a particular disease or condition. In another embodiment, the therapeutic molecule is a pro-apoptotic molecule. A pro-apoptotic molecule would be therapeutic, for example, for the treatment of a condition in which cell death is the goal (such as cancer).

[0103] Toxin: A poisonous substance produced by living cells or organisms. Toxins are usually proteins that are capable of causing disease by interacting with biological macromolecules such as enzymes or cellular receptors. Toxins vary greatly in their severity, ranging from usually minor and acute to almost immediately deadly (as in botulinum toxin). Biotoxins vary greatly in purpose and mechanism, and can be highly complex or relatively small proteins.

[0104] Transduced and Transformed: A virus or vector “transduces” or “transfects” a cell when it transfers nucleic acid into the cell. A cell is “transformed” by a nucleic acid transduced into the cell when the DNA becomes stably replicated by the cell, either by incorporation of the nucleic acid into the cellular genome, or by episomal replication. Transformation encompasses all techniques by which a nucleic acid molecule might be introduced into such a cell, including transfection with viral vectors, transformation with plasmid vectors, and introduction of naked DNA by electroporation, lipofection, and particle gun acceleration.

[0105] Transcription factor: Also referred to herein as a “transcription activator,” is a polypeptide factor that binds to and induces transcription of a polynucleotide sequence operably linked to a polynucleotide sequence including a nucleotide response element specific for that factor. A response element is specific for a specified transcription factor if the transcription factor specifically binds to the nucleotide sequence of the response element. Commonly, a response element is defined by a consensus sequence encompassing nucleotide variants based on shared nucleotide core sequence.

[0106] Transcription STOP signal: A nucleotide sequence that terminates transcription of an operably linked polynucleotide sequence.

Transcription (or expression) is said to be “dependent” on a molecule, event or occurrence if it is regulated either positively or negatively by the molecule, event or occurrence. Also referred to as a “transcription stop signal.”

[0107] Transgene: An exogenous or heterologous nucleic acid sequence. A transgene is a gene or genetic material that has been transferred by any of a number of genetic engineering techniques from one organism, vector or DNA sample to another. In some cases, a transgene is incorporated into an animal's (or other organism's) germ line. For example, in higher vertebrates this can be accomplished by injecting the foreign DNA into the nucleus of a fertilized embryo. “Transgene” can also describe any DNA sequence that has been introduced into an organism or vector construct. For example, a transgene can be a heterologous nucleic acid introduced into a viral vector. As described herein, a transgene can comprise any one of a number of molecules (genes or proteins), including, but not limited to, therapeutic molecules, wild-type proteins, toxins, pro-apoptotic proteins and marker proteins.

[0108] Transgenic: In reference to an animal or cell, “transgenic” indicates that at least one heterologous nucleic acid, a “transgene,” has been introduced into the genome of the animal (or cell). The transgene can be homologously integrated into the genome of the organism based on sequence specific recombination between the heterologous nucleic acid and polynucleotide sequences endogenous to the organism's genome. Alternatively, the transgene can be randomly integrated into a chromosome of the organism. In some instances, the transgene is maintained within one or more cells of the organism without integration into a chromosome. Methods for producing transgenic animals are well known in the art. For example, methods sufficient to guide one of skill in the art in the production of transgenic animals can be found, for example, in Hogan and Costantini, Manipulating the Mouse Embryo (1994) Cold Spring Harbor Laboratory Press, Cold Spring Harbor.

[0109] Vector: A nucleic acid molecule introduced into a host cell, thereby producing a transformed host cell. A vector can include nucleic acid sequences that permit it to replicate in the host cell, such as an origin of replication. A vector can also include one or more selectable marker genes and other genetic elements. An insertional vector is capable of inserting itself into a host nucleic acid. In some embodiments herein, a vector comprises an adenovirus vector, an adeno-associated virus vector, a lentivirus vector, a retrovirus vector or a herpesvirus vector.

### III. Overview of Several Embodiments

[0110] Described herein are methods of subtractive transgenics, wherein the expression pattern of one selective promoter is subtracted from the expression pattern of a second selective promoter.

[0111] Provided herein is a transgenic non-human animal comprising (a) a first heterologous nucleic acid encoding a recombinase operably linked to a first selective promoter; (b) a second heterologous nucleic acid encoding a transcription factor operably linked to a second selective promoter, wherein expression of the transcription factor is regulated by expression of the recombinase; and (c) a third heterologous nucleic acid comprising a transgene under the transcriptional control of a response element specific for the transcription factor.

[0112] Further provided is a method of producing a non-human animal that expresses a transgene in a selected population or sub-population of cells, the method comprising identifying at least one progeny of a cross between (a) a first transgenic non-human animal comprising first heterologous nucleic acid encoding a recombinase operably linked to a first selective promoter; and (b) a second transgenic non-human animal comprising a second heterologous nucleic acid comprising a polynucleotide sequence that encodes a transcription factor operably linked to a second selective promoter, wherein the polynucleotide sequence is (i) flanked by recombinase recognition sites; or (ii) preceded by a transcription STOP signal flanked by recombinase recognition sites, wherein the at least one identified progeny comprises the first and second heterologous nucleic acids and wherein the at least one progeny further comprises a transgene under the transcription regulatory control of a response element specific for the transcription factor.

[0113] In one embodiment of the methods, the recombinase is expressed in a first population of cells and the transcription factor is expressed in a second population of cells, wherein the first and second populations of cells comprise at least one overlapping sub-population of cells and at least one non-overlapping sub-population of cells. In one example, the transgene is expressed only in the at least one overlapping sub-population of cells. In another example, the transgene is expressed only in the at least one non-overlapping sub-population of cells.

[0114] In one embodiment, the transcription factor is disabled by expression of the recombinase. In one example, the second heterologous nucleic acid comprises recombinase recognition sites flanking the transcription factor, such that expression of the transcription factor is disabled by excision of the transcription factor by the recombinase.

[0115] In another embodiment, expression of the transcription factor is enabled by expression of the recombinase. In one example, the second heterologous nucleic acid comprises a transcriptional STOP signal preceding the transcription factor that prevents expression of the transcription factor, wherein the transcriptional STOP signal is flanked by recombinase recognition sites, such that expression of the transcription factor is enabled by excision of the transcriptional STOP signal by the recombinase.

[0116] The recombinase can be any recombinase known in the art. For example, the recombinase can be a Cre recombinase, a flp recombinase or a β-recombinase. In addition, the transcription factor can be any transcription factor known in the art. In one embodiment of the methods, the transcription factor is a tTA transcription factor or a fusion protein thereof. When tTA is the transcription factor, the response element can be a tetO transcription response element. In one embodiment, the transcription factor binds to the response element in the absence of an inducing agent. In another embodiment, the transcription factor binds to the response element in the presence of an inducing agent. The appropriate inducing agent is selected based upon which transcription factor and response element are used. For example, if the transcription factor and response element are tTA and tetO, respectively, the inducing agent is selected from tetracycline, doxycycline, or a bioactive derivative thereof.

[0117] In one embodiment, at least one of the first and second selective promoters comprises a tissue specific promoter. In another embodiment, at least one of the first and second selective promoters comprises a temporally specific promoter. In another embodiment, at least one of the first and second selective promoters comprises an inducible promoter. In one embodiment, at least one of the first and second selective promoters comprises a promoter that is selective for neural cells. In another embodiment, both the first and second selective promoters are selective for neural cells. In one aspect, the first and second selective promoters are selective for different neural cells. In another aspect, the first and second selective promoters are selective for an overlapping subset of neural cells. In another embodiment, at least one of the first and the second selective promoters are selective for non-neural cells.

[0118] In one embodiment, the transgene is expressed in granule cells of the dentate gyrus. In another embodiment, the transgene is expressed in cholinergic neurons. In another embodiment, the transgene is expressed in the prefrontal cortex. In another embodiment, the transgene is expressed in a subset of inhibitory interneurons. In one aspect, the subset of inhibitory interneurons is SMT+ interneurons. In another aspect, the subset of inhibitory interneurons is SMT+/CBP+ interneurons.

[0119] In one embodiment, the selective promoter is ChAT. In another embodiment, the selective promoter is Drd4. In another embodiment, the selective promoter is CCK. In another embodiment, the selective promoter is calbindin. In another embodiment, the selective promoter is CamKIIα.

[0120] Also provided is an isolated transgenic cell from a transgenic non-human animal described herein.

[0121] Further provided is a method for selective expression of a transgene in a population or sub-population of cells in an animal, comprising administering to the animal (a) a first viral vector comprising a nucleic acid encoding a recombinase operably linked to a nucleic acid encoding a first selective promoter; (b) a second viral vector comprising a nucleic acid encoding a transcription factor operably linked to a nucleic acid encoding a second selective promoter, wherein expression of the transcription factor is regulated by expression of the recombinase; and (c) a third viral vector comprising a transgene under the transcriptional control of a response element specific for the transcription factor. In one embodiment, the animal is a non-human animal. In another embodiment, the animal is a human.

[0122] In some embodiments, the first, second and third viral vectors are independently selected from adenovirus vectors, adeno-associated virus vectors, lentivirus vectors, retrovirus vectors and herpesvirus vectors.

[0123] The transgene referenced in methods, constructs, and animals described herein can comprise (or encode) any molecule whose expression is desired in a specific population or sub-population of cells. In one embodiment, the transgene is (or encodes) a therapeutic molecule, a toxin or a maker protein. The therapeutic molecules can be any of a number of types of molecules, including, but not limited to a wild-type gene or a pro-apoptotic molecule. In another embodiment, the transgene comprises the viral genes necessary for packaging of an infectious virus.

[0124] In one embodiment, the recombinase is expressed in a first population of cells and the transcription factor is expressed in a second population of cells, wherein the first and second populations of cells comprise at least one overlapping sub-population (or subset) of cells and at least one non-overlapping sub-population (or subset) of cells. In one example, the transgene is expressed only in the at least one overlapping sub-population of cells. In another example, the transgene is expressed only in the at least one non-overlapping sub-population of cells.

[0125] In one embodiment, the transcription factor is disabled by expression of the recombinase. In one example, the second heterologous nucleic acid comprises recombinase recognition sites flanking the transcription factor, such that expression of the transcription factor is disabled by excision of the transcription factor by the recombinase.

[0126] In another embodiment, expression of the transcription factor is enabled by expression of the recombinase. In one example, the second heterologous nucleic acid comprises a transcriptional STOP signal preceding the transcription factor that prevents expression of the transcription factor, wherein the transcriptional STOP signal is flanked by recombinase recognition sites, such that expression of the transcription factor is enabled by excision of the transcriptional STOP signal by the recombinase.

[0127] The recombinase can be any recombinase known in the art. For example, the recombinase can be a Cre recombinase, a flp recombinase or a β-recombinase. In addition, the transcription factor can be any transcription factor known in the art. In one embodiment of the methods, the transcription factor is a tTA transcription factor or a fusion protein thereof. When tTA is the transcription factor, the response element can be a tetO transcription response element. In one embodiment, the transcription factor binds to the response element in the absence of an inducing agent. In another embodiment, the transcription factor binds to the response element in the presence of an inducing agent. The appropriate inducing agent is selected based upon which transcription factor and response element are used. For example, if the transcription factor and response element are tTA and tetO, respectively, the inducing agent is selected from tetracycline, doxycycline, or a bioactive derivative thereof.

[0128] In one embodiment, at least one of the first and second selective promoters comprises a tissue specific promoter. In another embodiment, at least one of the first and second selective promoters comprises a temporally specific promoter. In another embodiment, at least one of the first and second selective promoters comprises an inducible promoter. In one embodiment, at least one of the first and second selective promoters comprises a promoter that is selective for neural cells. In another embodiment, at least one of the first and the second selective promoters are selective for non-neural cells. In another embodiment, at least one of the first and the second selective promoters are selective for cancer cells. In one aspect, the cancer cell is an AML stem cell. In another embodiment, at least one of the first and the second selective promoters are selective for a population of immune cells. In one aspect, the immune cells are lymphocytes. In another embodiment, at least one of the first and the second selective promoters are selective for infected cells. In another embodiment, at least one of the first and the second selective promoters are selective for a cell comprising a genetic mutation.

[0129] Also provided herein are kits for use with subtractive transgenics. In one embodiment, the kit comprises (1) a first viral vector comprising a nucleic acid encoding a recombinase operably linked to a nucleic acid encoding a first selective promoter; (2) a second viral vector comprising a nucleic acid encoding a transcription factor operably linked to a nucleic acid encoding a second selective promoter; and (3) a third viral vector comprising a transgene under the transcriptional control of a response element specific for the transcription factor.

[0130] Further provided are kits comprising nucleic acids for the generation of subtractive transgenic animals. Such kits can include injection constructs for the production of a transgenic animal. In one embodiment, the kit comprises (1) a first injection construct comprising a nucleic acid encoding a recombinase operably linked to a first selective promoter; (2) a second injection construct comprising a nucleic acid encoding a transcription factor operably linked to a second selective promoter, wherein expression of the transcription factor is regulated by expression of the recombinase; and (3) a third injection construct comprising a transgene under the transcriptional control of a response element specific for the transcription factor. In one embodiment, the second injection construct comprises the nucleotide sequence of SEQ ID NO: 22. In another embodiment, the second injection construct comprises the nucleotide sequence of SEQ ID NO: 23. In another embodiment, the second injection construct comprises the nucleotide sequence of SEQ ID NO: 24. In another embodiment, the second injection construct comprises the nucleotide sequence of SEQ ID NO: 25. In another embodiment, the second injection construct comprises the nucleotide sequence of SEQ ID NO: 26. In another embodiment, the second injection construct comprises the nucleotide sequence of SEQ ID NO: 27.

### IV. Subtractive Transgenic Animals

[0131] The present disclosure further concerns a strategy for producing non-human animals capable of expressing a transgene with a specificity (e.g., an anatomical, spatial, cell, tissue and/or temporal specificity) exceeding that achieved using native promoters. The approach described herein is designated “subtractive transgenics,” because the expression specificity of one promoter is subtracted from that of another. In the subtractive transgenic animals, a transgene of interest is expressed with consistently higher specificity as compared to native promoters. Subtractive transgenics combines two technologies, a site specific recombinase system (such as the Cre/lox system) and an inducible promoter system (such as the tTA/tetO system). In combination, these two systems can be used to increase the specificity, such as the anatomical specificity, of transgene expression. Individually, these systems involve crossing a “trans” line (in which the functional effect depends upon protein expression) to a “cis” line (in which the functional element is a DNA sequence). In both systems, the resultant specificity depends upon the promoter expressing the trans element.

[0132] In a site-specific recombinase system, such as the Cre/lox system (for a review of this system see Nagy, Genesis 26(2):99-109, 2000), the trans element is the recombinase (Cre), which can excise any sequence in the genome that is flanked by the corresponding recombinase recognition (loxp) sites (FIG. 1A). This approach has previously been used to make anatomically-specific knockouts, for example, by crossing a mouse expressing a recombinase under the control of a neuron-specific promoter to one in which recombinase recognition sites have been introduced into on either side of an endogenous target gene via homologous recombination in embryonic stem (ES) cells (see, for example, Nakazawa et al. Science 297(5579):211-8, 2002). In the resulting crossed transgenic animals, the target gene is excised only where and when the recombinase is expressed. Suitable site-specific recombinase systems include the Cre/lox system disclosed in, for example, U.S. Pat. No. 6,570,061; the FLP/frt system disclosed in, for example, U.S. Pat. Nos. 6,774,279 and 5,654,182; and the β-recombinase system disclosed in, for example, U.S. Pat. No. 6,780,644. Each of these patents is incorporated herein by reference in its entirety.

[0133] An exemplary inducible promoter system is the tTA/tetO system (FIG. 1B), although any regulatory system with analogous regulatory elements is equally suitable in the context of this disclosure. In the tTA/tetO system a transgenic animal (such as a mouse) expressing the trans element (such as the tTA fusion protein) under the control of an exogenous promoter is crossed to a transgenic animal in which a transgene is placed under the regulatory control of the tetO element. When tTA binds to the tetO element, the transgene is expressed. The binding of tTA is tetracycline-dependent, enabling the inducible expression of the transgene wherever the tTA protein is expressed. With tTA, the addition of tetracycline (or its analog doxycycline) turns transgene expression off. The same principles apply in the closely-related rtTA system, but the effect of tetracycline is reversed (Gossen and Bujard, Annu. Rev. Genet. 36:153-73, 2002; and U.S. Pat. Nos. 5,589,362; 5,789,156; 5,654,168; 5,866,755; 5,859,310; and 5,922,927; each of which is incorporated herein by reference).

[0134] Transgenic animals have been produced with these systems utilizing neuron-specific promoters (Schonig et al., Nucl Acids Res. 30, No. 23, e134, 2002; Yu et al., Proc. Natl. Acad. Sci. USA 102:8615-8620, 2005). For example, Cre recombinase has previously been expressed under the control of the tetO element, creating inducible knockouts. This is a triple cross in which one line expresses tTA under the control of a native promoter, but the transgene under the control of the tetO element is Cre recombinase. When crossed to another line containing an endogenous gene flanked by loxP recognition sites, recombinase-mediated excision of the endogenous gene is as anatomically specific as the native promoter. In addition, Cre expression is tetracycline-dependent, ensuring that recombination only occurs at the time selected by the practitioner. However, in all such previously-reported cases the anatomical restriction of transgene expression is dependent upon a single promoter construct, and so can therefore only be as specific as the native promoter itself.

[0135] “Subtractive transgenics” as provided herein enables the production of transgenic animals with predictable, highly specific patterns of inducible gene expression in distinct cellular subpopulations (or subsets) by subtracting the expression pattern of one promoter from that of another. Accordingly, one aspect of this disclosure concerns methods for producing non-human transgenic animals that express a transgene in a selected subset of cells. The method involves identifying at least one progeny of a cross between a first transgenic non-human animal that contains in its genome a first heterologous nucleic acid (transgene) that encodes a recombinase operably linked to a first selective promoter and a second transgenic non-human animal that contains in its genome a second heterologous nucleic acid (transgene) that encodes a transcription factor operably linked to a second selective promoter. The polynucleotide sequence that encodes the transcription factor is either flanked by site-specific recombinase recognition sites or preceded by a transcription STOP signal that is flanked by site-specific recombinase recognition sites. The identified progeny contains in its genome both of these heterologous nucleic acids, and further a transgene that is under the regulatory control of a response element specific for the transcription factor. Such a transgenic animal expresses the transgene in a highly specific manner only in those cells in which the transcription factor is expressed, and in a manner that is dependent on expression of the recombinase. Based on the selection of promoters, expression can be in any specified sub-population of cells. The animals can be any non-human animals, including mammals and other vertebrates. For example, the transgenic animals can be rodents, such as mice; domesticated livestock, such as cows, sheep, goats, pigs or horses; companion animals; endangered species; and so forth. Similarly, the non-human animal can be a non-human primate. Transgenic animals of any species that possess in their genomes (a) a heterologous nucleic acid that encodes a recombinase operably linked to a first selective promoter; (b) a heterologous nucleic acid that encodes a transcription factor operably linked to a second selective promoter, expression of which is dependent on expression of the recombinase; and (c) a transgene under the transcriptional control of a response element specific for the transcription factor are also features of this disclosure, as are cells derived from such animals.

[0136] In exemplary embodiments, transgenic lines are established that incorporate a transcriptional activator (such as tTA) that has been flanked by recognition sites for a site specific recombinase (such as Cre), or that has been preceded with a transcriptional STOP signal flanked by such recognition sites, under the control of one selective (for example, spatially or temporally selective) promoter. The resulting line (the “ftTA” or “fSTOP-tTA” line, as exemplified herein) is crossed to a line expressing the corresponding recombinase (e.g., Cre recombinase) with a partially overlapping expression pattern. In the case of an ftTA line, wherever Cre is expressed, the tTA construct will be disabled (excised), resulting in expression of tTA (and thereby the ability for tetracycline-dependent transgene expression) only where transgene expression in the two lines does not overlap. The converse is true in the case of an fSTOP-tTA line, which expresses tTA only where expression of the Cre and tTA lines overlap due to excision of the transcriptional STOP, enabling transcription of tTA. Thus, the ftTA strategy generates an expression pattern analogous to an AND NOT Boolean logic, in which a transgene under control of the tetO element is inducibly expressed only in cells that express tTA but not Cre (FIG. 3A), while the fSTOP-tTA strategy operates by a Boolean AND logic, enabling transgene expression only where the fSTOP-tTA and Cre lines are both expressed (FIG. 3B).

[0137] Essentially any site-specific recombinase can be utilized in the methods disclosed herein. For example, non-limiting examples of site-specific recombinases include the Cre recombinase, the FLP recombinase and β-recombinases. Similarly, essentially any transcriptional factor can be used. In specific embodiments, the transcription factor is a transcription activator that binds to its response element in the presence of an inducing agent (for example, the tetracycline dependent tTA transcription factor binds to the tetO response element in the presence but not in the absence of tetracycline, or a bioactive derivative thereof, such as doxycycline). In addition, any promoter or pair of promoters can be utilized in the methods disclosed herein so long as the promoter(s) generate at least a partially overlapping expression pattern. Typically, the promoter(s) are selective promoters that direct expression in a spatially selective or temporally selective manner. For example, a spatially selective expression pattern can include expression in a specified tissue, a specified organ or one or more specified populations of cells. Thus, the present disclosure describes a method in which the specificity of expression of an inducible transactivator (for example, tTA), and therefore the regulated expression of any transgene, is substantially enhanced relative to native promoters.

[0138] In brief, an exemplary method described herein involves three distinct steps, although it is noted that the crossing steps can be performed in any order:
[0139] 1) Generation of animals with “floxed” tTA (ftTA) and/or floxed STOP-tTA (fSTOP-tTA) under the control of a specific promoter and the generation of animals with Cre recombinase under the control of a different specific promoter;
[0140] 2) Crossing the ftTA and/or fSTOP-tTA lines to animals expressing the Cre recombinase with partially-overlapping expression patterns; and
[0141] 3) Crossing the resulting “subtracted” lines to a line expressing a transgene under the control of the tetO promoter.

[0142] The basic strategy of one exemplary embodiment is to “flox”, or precede with a floxed transcriptional STOP sequence, the tTA injection construct, and then cross the resulting “ftTA” or “fSTOP-tTA” line to another line that expresses the Cre recombinase with a partially overlapping anatomical distribution. Wherever Cre is expressed, tTA is excised or activated, respectively. In this way, the expression pattern of one promoter construct is “subtracted” from that of another. The tTA protein, and therefore the ability to express a transgene from the tetO promoter, remains only in those sub-populations of cells where the two lines do (in the case of fSTOP-tTA) or do not (in the case of ftTA) overlap. The resulting subtracted animal lines thereby exceed the specificity of either parent line—in that the expression of the transgene is more narrowly, or more specifically, regulated. By selecting appropriate promoters (and/or pairs of promoters), the methods provided herein make it possible to manipulate individual cell types, such as single elements of neural circuits.

[0143] Animals carrying transgenes with such selectivity of expression are useful for a wide variety of purposes, including the development of model systems for human disorders, such as neurological disorders including Alzheimer's disease, Parkinson's disease and Huntington's disease that affect a specific subset of neural cells with devastating effect. For example, a “silencer” construct (for example, a transgene capable of reducing cell response to stimuli) can be expressed with enhanced specificity, providing a powerful tool for the analysis and influencing of functional relationships between cells, such as in central neural circuits, and making it possible to inactivate part of a functional unit (for example, while recording the ramifications of this inactivation).

[0144] In one embodiment, the methods described herein generate lines of transgenic animals capable of temporally and spatially regulated expression of transgene(s). The methods consistently and reproducibly yield increased specificity of transgene expression, such as is sufficient for the analysis of neural circuits. Although the examples and discussion provided throughout this disclosure focus on the expression of transgenes in selected neural cells, the disclosed methods are equally applicable to producing transgenic animals that express a transgene in selected non-neural cells.

[0145] Depending upon the specific promoter (or promoter pairs) chosen, the disclosed methods result in increased temporal and/or cell or tissue-type specificity of transgene expression. This subtractive system is modular and combinatorial; by choosing different promoter pairs for the Cre and tTA lines, one can direct expression of any tetO-driven transgene to a virtually unlimited number of cell subtypes. The method does not require that the constituent promoters express in a limited number of cell types, just that the constituent promoters express in some, but not all, the same cell types resulting in an area (that is, a subset of cells) of no overlap that is more limited than full expression scope of the selected promoter(s). While not every promoter pair will result in restriction to a single cell type, every promoter pair will have greater specificity than the parent promoters. Additionally, the subtractive system can also incorporate new advances in promoter specificity (for example, based upon identification of neuron-specific enhancers) as they arise.

[0146] Furthermore, as an alternative to (or additive to) employing pairs of promoters with overlapping specificities, a practitioner can take advantage of variability in expression patterns observed in lines of transgenic animals developed from independent founders that exhibit insertional variability in their expression patterns. Typically, insertional variability results in similar, but often non-identical expression patterns in founder animals (and their progeny) with different transgene integration sites. A practitioner of ordinary skill in the art can readily produce multiple lines of transgenic animals using the same transgene construct, characterize the expression pattern on a cellular level, and select appropriate lines that provide or will result in (e.g., after one or more additional crosses) the desired overlapping expression specificity.

[0147] As illustrated schematically in FIG. 2, a transgenic animal that has a floxed tTA (ftTA) under the control of a promoter that confers expression in cells A, B, C, D is crossed with another transgenic animal that has the Cre recombinase regulated by a promoter that expresses in the same cells B, C, D (and can also express in non-overlapping cells E, F, G etc.) but does not express in cells A. Crossing the two transgenic animals produces progeny in which tTA expression occurs only in cell type A, which can then specifically drive expression of a transgene under the transcriptional control of the tetO response element.

[0148] In contrast, when an fSTOP-tTA animal under the control of a promoter that expresses in cells A, B, C and D is crossed with a transgenic animal that expresses Cre in cells B, C and D, the animal expresses tTA in cells B, C and D and is capable of inducibly expressing a transgene under tetO regulation in these same cells.

[0149] In certain examples, the transgene is a “silencer” (see, for example, Ibanez-Tallon et al. Neuron 43(3):305-11, 2004). For example, by expressing a silencer under the control of the tetO response element in specific cells of the nervous system, it is possible to reversibly remove a neuron from participating in a circuit, either by preventing it from spiking or by interfering with neurotransmission, in a manner analogous to shorting out an electronic circuit element. This molecular short-circuit provides a relatively unambiguous and demonstrable effect on both the cellular and network level. Once a line is confirmed to possess the desired expression pattern, the extent to which neuronal silencing occurs is determined by a combination of extracellular unit or field recordings in vivo and field and intracellular recordings in vitro. In addition to yielding a wealth of electrophysiological data regarding the functional attributes of specific neural circuits, the methods and animals disclosed herein are also useful for generating more accurate and informative models of clinical disorders.

[0150] While any transgene can be expressed with maximal specificity using the methods disclosed herein, these methods are particularly useful for expressing genes (including modified genes) that model human disease within or outside the nervous system. For example, overexpression of proteins, such as amyloid precursor protein (APP) or presenilins (for example, Arancio et al. EMBO J. 23(20):4096-4105, 2004) relevant to Alzheimer's disease can be achieved with sufficient temporal and anatomical specificity to evaluate their primary and secondary effects. Similarly, molecules that have neuroprotective or anti-aging effects can be expressed with similar control, allowing comparison of protective effect relative to ischemic insult or aging between adjacent neurons. Additionally, transgenic animals produced according to the methods disclosed herein are useful for evaluating specific roles played by cells that have been compromised by trauma in order to develop strategies (such as implanting prostheses) to mitigate cellular loss.

[0151] A. Promoter Selection

[0152] In the production of transgenic animals or cell lines, it is frequently observed that different lines established from founders with independent transgene insertion events have similar (for example, overlapping) but non-identical transgene expression patterns. Thus in the context of subtractive transgenics, the same promoter can be used to produce multiple lines, which are then characterized with respect to transgene expression pattern. Two lines (a transcription factor line and a recombinase line) with non-identical expression patterns that differ with respect to expression in a cell type(s) of interest are selected and crossed to produce progeny that are capable of expressing the transgene exclusively in the cell type(s) of interest. This selection process is well within the ability of one of ordinary skill.

[0153] Thus, promoter selection can be influenced by taking advantage of the insertional variability in expression patterns that result from multiple founders made using the same promoter. Since these lines often express in slightly different subsets of cells than the native promoter, insertional effects become a valuable source of expression specificity diversity for the subtractive transgenic method. For example, as discussed further in the section entitled “EXAMPLES,” the Calcium-Calmodulin-dependent Protein Kinase II alpha subunit (CamKIIα) promoter expresses strongly in a variety of neuronal cell types in the forebrain, and has yielded significant variability in expression patterns that arise in different founders made using the same construct. Although simply selecting a line with a desirable anatomical (and/or temporal) expression pattern has been useful to increase specificity of expression, the expression patterns obtained typically involve more than a single neuron type. With a subtractive strategy as provided herein, however, this variability can be used combinatorially to produce a host of different cell-restricted expression patterns in different areas, including areas of the brain that are particularly interesting from a cognitive and clinical viewpoint (for example, cortex, striatum, hippocampus, and so forth).

[0154] Another method for selecting suitable promoter(s) involves utilizing the National Institutes of Health (NIH)-funded resource called Gene Expression Nervous System Atlas, or GENSAT project (on the world wide web at GENSAT.org, supported by NINDS Contract #NO1-NS-0-2331), located at Rockefeller University. The GENSAT project has created lines of transgenic mice that express an enhanced green fluorescent protein (GFP) reporter gene from hundreds of different promoters using bacterial artificial chromosomes (BACs), and anatomically characterized the resulting GFP expression pattern. The resulting lines not only demonstrate the expression pattern governed by the promoter, but also show whether a particular promoter is capable of reproducibly driving a transgene with a consistent (or variable) expression pattern.

[0155] For example, once a suitable promoter has been selected from among those catalogued in the GENSAT project, an ftTA or fSTOP-tTA construct can be produced in which the floxed tTA (or floxed STOP tTA) encoding sequences are used (such as in place of GFP) in an analogous shuttle vector. In brief, a BAC construct is made by selecting a BAC clone 5′ to the gene of interest and then preparing shuttle vectors specific to that BAC clone (FIG. 6). The shuttle vectors can be RecA positive selectable targeting constructs (such as those based upon the Pld53 backbone, see Gong et al. Nature 425(6961):917-925, 2003) in which the DNA to be inserted is flanked by one or two stretches of sequence identical to contiguous sequences in the BAC (the A and B box, see FIG. 6). The targeting construct is then electroporated into host bacteria containing the BAC clone of interest. Integration of the targeting vector into the BAC by homologous recombination is then assayed by exposure to the appropriate selection agent; vector sequences can be resolved by a second round of selection. A floxed tTA (or fSTOP-tTA) construct can be produced by ligating the floxed tTA (or fSTOP-tTA sequences) into the shuttle vector. Optionally, the GFP of the GENSAT vector can be retained.

[0156] These lines express ftTA with the same specificity as the native promoter. Furthermore, if the GFP is retained, the “subtracted” neurons express GFP, facilitating analysis of anatomical and/or temporal restriction of expression.

[0157] Optionally, additional markers can be added to the construct to facilitate analysis of the subtracted lines. For example, the Piresii-red2 reporter (Clontech, Mt. View, Calif.) can be inserted into the vector in place of or in addition to GFP (FIG. 6). Alternatively, the mOrange fluorophore (Shaner et al., Nature Biotechnol 22(12) 1554 2004) can be added to the ftTA construct either as a fusion protein or by putting an internal ribosome initiating site (IRES) 3′ of the tTA sequence but 5′ of the mOrange sequence, which would also be in turn 5′ of the 3′ loxp site. Inclusion of such additional fluorophores results in a subtracted line with red (or orange) cells that express the tTA transgene, in contrast to the green ones that have been subtracted, obviating the need for in situ hybridization to characterize the transgenic lines.

[0158] Suitable promoters and/or pairs of promoters can also be identified by reviewing the literature and selecting promoters having the desired expression characteristics. However, in many cases, the published expression patterns lack a high degree of resolution. For many transgenes, the only expression data comes from in situ hybridization, often visualized simply by allowing S³⁵-labelled tissue slices to expose X-ray film placed on top of the slide. While radiographic methods have the benefit of being relatively quantitative, it is difficult to determine anything finer than what can be determined from gross anatomical structures that show signal with X-ray film. Excellent anatomical information can also be obtained from emulsion-dipped slides of radioactive in situ hybridizations, which combines the quantitative accuracy of radiography with cellular resolution. In any case, a practitioner may desire to further characterize the expression profile of a selected (or potential) promoter in order to ensure that the characteristics are as desired for the subtractive expression procedure being used or developed.

[0159] Alternatively, promoters can be selected by characterizing de-novo the expression pattern in one or more lines of transgenic animals that express a transgene under the control of the promoter in question.

[0160] B. Crossing of Transgenic Animals

[0161] In one exemplary embodiment, subtraction of expression patterns requires crossing a floxed tTA line to a complementary Cre line, for example, a line in which expression of Cre overlaps with tTA expression in all but one neuronal cell type. FIG. 5 illustrates gene expression in two lines of mice with overlapping expression of particular interest for generating hippocampal-specific transgene expression via subtraction. For example, mating an ftTA line that expresses only in dentate and CA1 to the Cre line shown in FIG. 5C results in dentate-specific expression, whereas mating an ftTA line that expresses in dentate, CA1, and CA3 results in CA3-specific expression of the transcriptional activator.

[0162] Following identification of progeny that express the transcription factor in the desired cells, the identified progeny are crossed with a transgenic line that expresses a transgene under the control of a response element specific for the transcription factor. In the exemplary embodiment utilizing the tTA transcription factor, the transgene is placed under the regulatory control of the tetO response element. Placing a transgene under the control of the tetO response element enables expression of the transgene in a regulated fashion based upon the presence or absence of doxycycline in the animal's diet. Essentially any transgene of interest can be used in this context. For example, one class of transgene includes silencer constructs that “turn off,” or inhibit the activity of cells, such as toxins, dominant negative constructs, and inhibitory RNA molecules. In other examples, the transgenes are particular nucleic acids of interest with respect a particular cell type, condition, and/or disease. In yet other examples, the transgenes are markers (such as reporters).

[0163] The transgene is inserted into a convenient cloning site (such as NotI) of a tetO vector (Pmm400) or into an equivalent restriction site preceded by any response element inducible by a transcription factor. The resulting animals are mated to an animal of a subtracted line (generated by crossing Cre and tTA lines with overlapping expression patterns) described herein. The resulting transgenic progeny express the transgene in a tetracycline-dependent manner in the specified neural cells.

[0164] In certain examples, the transgene is a neural silencer. There are several different types of expressible silencer constructs available, ranging from inward-rectifier K+ channels, which basically decrease the excitability of the neuron, to those which specifically interfere with synaptic transmission. For example, one type of a silencer suitable for use in the context of the subtractive transgenic animals described herein is the nontoxic heavy chain of tetanus toxin described by Maskos et al. (Proc. Natl. Acad. Sci. U.S.A. 99(15):10120-10125, 2002). The heavy chain of tetanus toxin is involved in transynaptic transport. The particular derivative described by Maskos has been fused to GFP, thereby creating an expressible retrograde transynaptic marker that is effectively expressed in transgenic animals when operably linked to the calbindin minimal promoter. Additionally, the tetanus toxin-GFP fusion protein also includes lacZ via an IRES site, in effect creating a construct capable of differentiating between the initial cell (which would be GFP+ and lacZ+) and its upstream inputs (which would express GFP only).

[0165] Additional silencers include dominant negative transgenes which are capable of functional removal of the cells in which they are expressed. In neural cells, there are two basic types of functional silencer, each of which can be either ligand-gated or constitutive: (1) silencers of spiking, and (2) silencers of neurotransmission. Some silencers inhibit spiking by decreasing the input resistance of the membrane and thereby shunting excitatory current, or by providing a hyperpolarizing current which counteracts synaptic depolarization, preventing the membrane from reaching spike threshold. Examples of ligand-gated silencers include the ivermectin-sensitive chloride channel developed by Slimko and Lester (FEBS Lett. 528(1-3):77-82, 2002), the insect allatostatin receptor (Lechner et al., J. Neurosci. 22(13):5287-5290, 2002) and VAMP-MIST constructs (Karpova et al., Soc. Neurosci Program No. 808.1, 2004; Karpova et al. Neuron 48(5):727-735, 2006), composed of a synaptic vesicle protein susceptible to a chemical crosslinking agent (the “ligand”). Silencers which act at the level of neurotransmission, such as the shibire(ts) allele of Drosophila (see, Kitamoto, Proc. Natl. Acad. Sci. U.S.A. 99(20):13232-13237, 2002), prevent neither depolarization nor associated calcium entry, rather they work by inhibiting the release of synaptic vesicles. The tetanus toxin light chain is more specific as it proteolytically destroys a protein needed for vesicle release (VAMP2, Yu et al. Neuron 42(4):553-66, 2004).

[0166] Other examples of silencers include a “tethered” ω-conotoxin MVIIA or μ-conotoxin MrVIA. These constructs have been demonstrated to specifically block voltage-gated Ca′1 and Na+ channels only in the cells in which they are expressed (Ibanez-Tallon et al. Neuron 43(3):305-11, 2004).

[0167] C. Generating Transgenic Animals

[0168] Any transgenic animal can be of use in the methods disclosed herein, provided the transgenic animal is a non-human animal. A “non-human animal” includes, but is not limited to, a non-human primate, a farm animal such as swine, cattle, and poultry, a sport animal or pet such as dogs, cats, horses, hamsters, rodents, or a zoo animal such as lions, tigers or bears. In one specific, non-limiting example, the transgenic animal is a mouse.

[0169] A transgenic animal contains cells that bear genetic information received, directly or indirectly, by deliberate genetic manipulation at the subcellular level, such as by microinjection or infection with a recombinant virus, such that a recombinant DNA is included in the cells of the animal. This molecule can be integrated within the animal's chromosomes, or can be included as extrachromosomally replicating DNA sequences, such as might be engineered into artificial chromosomes. A transgenic animal can be a “germ cell line” transgenic animal, such that the genetic information has been taken up and incorporated into a germ line cell, therefore conferring the ability to transfer the information to offspring. If such offspring in fact possess some or all of that information, then they, too, are transgenic animals.

[0170] Transgenic animals can readily be produced by one of skill in the art. For example, transgenic animals can be produced by introducing into single cell embryos DNA encoding a marker, in a manner such that the polynucleotides are stably integrated into the DNA of germ line cells of the mature animal and inherited in normal Mendelian fashion. Advances in technologies for embryo micromanipulation permit introduction of heterologous DNA into fertilized mammalian ova. For instance, totipotent or pluripotent stem cells can be transformed by microinjection, calcium phosphate mediated precipitation, liposome fusion, retroviral infection or other means. The transformed cells are then introduced into the embryo, and the embryo then develops into a transgenic animal. Developing embryos can also be infected with a retrovirus containing the desired DNA, and a transgenic animal is produced from the infected embryo.

[0171] In another example, the appropriate DNA(s) can be injected into the pronucleus or cytoplasm of embryos, preferably at the single cell stage, and the embryos are allowed to develop into mature transgenic animals. These techniques are well known. For instance, reviews of standard laboratory procedures for microinjection of heterologous DNAs into mammalian (mouse, pig, rabbit, sheep, goat, cow) fertilized ova include: Hogan et al., Manipulating the Mouse Embryo, Cold Spring Harbor Press, 1986; Krimpenfort et al., Bio/Technology 9:86, 1991; Palmiter et al., Cell 41:343, 1985; Kraemer et al., Genetic Manipulation of the Early Mammalian Embryo, Cold Spring Harbor Laboratory Press, 1985; Hammer et al., Nature 315:680, 1985; Purcel et al., Science 244:1281, 1986; U.S. Pat. No. 5,175,385; U.S. Pat. No. 5,175,384, each of which is herein incorporated by reference.

### V. Subtractive Transgenics in Animals Using Viral Vectors

[0172] Subtractive transgenics can also be applied to whole animals through the use of suitable viral vectors. To use subtractive transgenics in animals (as opposed to generating transgenic animals by introducing constructs into an ES cell), the system components are delivered using viral vectors. As with the production of transgenic animals described herein, three different viral vector constructs are employed: (1) a transactivator virus; (2) a recombinase virus; and (3) a transgene virus. The transactivator virus encodes a transactivator, such as tTA or a transcription factor. In addition, the transactivator virus comprises recombinase recognition sites. The recombinase recognition sites can either flank the transactivator, or they can flank a STOP signal that precedes the transactivator, much as described elsewhere herein. The recombinase virus encodes a recombinase (that recognizes the recombinase recognition sites in the transactivator virus). Any suitable recombinase can be used, such as Cre, FLP or β-recombinase. The transgene virus encodes any type of transgene of interest, wherein the transgene is regulated by an appropriate response element, much as described elsewhere herein. The response element employed depends upon the transactivator used for the transactivator virus. For example, if the transactivator virus encodes tTA, then the response element would be tetO.

[0173] The transactivator virus and recombinase virus can each be regulated by different specific promoters (such as tissue-specific, cell-specific or temporal-specific promoters). As described herein, the use of promoters exhibiting different expression patterns allows for the subtraction of the population of cells expressing one construct from the population of cells expressing the other construct.

[0174] A. Viral Vectors for Use with Subtractive Transgenics

[0175] Suitable viral vectors include, but are not limited to, adenovirus vectors, adeno-associated virus vectors, retroviral vectors, lentiviral vectors, herpesviral vectors, and the like.

[0176] Adenovirus vectors can be first, second, third and/or fourth generation adenoviral vectors or gutless adenoviral vectors. Adenovirus vectors can be generated to very high titers of infectious particles; infect a great variety of cells; efficiently transfer genes to cells that are not dividing; and are seldom integrated in the host genome, which avoids the risk of cellular transformation by insertional mutagenesis (Douglas and Curiel, Science and Medicine, March/April 1997, pages 44-53; Zern and Kresinam, Hepatology 25(2), 484-491, 1997). Representative adenoviral vectors which can be used for the methods provided herein are described by Stratford-Perricaudet et al. (J. Clin. Invest. 90: 626-630, 1992); Graham and Prevec (In Methods in Molecular Biology: Gene Transfer and Expression Protocols 7: 109-128, 1991); and Barr et al. (Gene Therapy, 2:151-155, 1995), which are herein incorporated by reference.

[0177] Adeno-associated virus (AAV) vectors also are suitable for use with subtractive transgenics. Methods of generating AAV vectors, administration of AAV vectors and their use are well known in the art (see, for example, U.S. Pat. No. 6,951,753; U.S. Pre-Grant Publication Nos. 2007-036757, 2006-205079, 2005-163756, 2005-002908; and PCT Publication Nos. WO 2005/116224 and WO 2006/119458, each of which is herein incorporated by reference).

[0178] Retrovirus, including lentivirus, vectors can also be used with the methods described herein. Lentiviruses include, but are not limited to, human immunodeficiency virus (such as HIV-1 and HIV-2), feline immunodeficiency virus, equine infectious anemia virus and simian immunodeficiency virus. Other retroviruses include, but are not limited to, human T-lymphotropic virus, simian T-lymphotropic virus, murine leukemia virus, bovine leukemia virus and feline leukemia virus. Methods of generating retrovirus and lentivirus vectors and their uses have been well described in the art (see, for example, U.S. Pat. Nos. 7,211,247; 6,979,568; 7,198,784; 6,783,977; and 4,980,289, each of which is herein incorporated by reference).

[0179] Suitable herpesvirus vectors can be derived from any one of a number of different types of herpesviruses, including, but not limited to, herpes simplex virus-1 (HSV-1), HSV-2 and herpesvirus saimiri. Recombinant herpesvirus vectors, their construction and uses are well described in the art (see, for example, U.S. Pat. Nos. 6,951,753; 6,379,6741 6,613,892; 6,692,955; 6,344,445; 6,319,703; and 6,261,552; and U.S. Pre-Grant Publication No. 2003-0083289, each of which is herein incorporated by reference).

[0180] B. Administration of Viral Vectors

[0181] The viral vectors can be administered to an animal using any suitable means known in the art. Methods of administration include, but are not limited to, intradermal, intramuscular, intraperitoneal, parenteral, intravenous, subcutaneous, vaginal, rectal, intranasal, inhalation, oral or by gene gun. Intranasal administration refers to delivery of the compositions into the nose and nasal passages through one or both of the nares and can comprise delivery by a spraying mechanism or droplet mechanism, or through aerosolization of the nucleic acid or virus. Administration of the compositions by inhalant can be through the nose or mouth via delivery by spraying or droplet mechanisms. Delivery can be directly to any area of the respiratory system via intubation. Parenteral administration is generally achieved by injection. Injectables can be prepared in conventional forms, either as liquid solutions or suspensions, solid forms suitable for solution of suspension in liquid prior to injection, or as emulsions. Injection solutions and suspensions can be prepared from sterile powders, granules, and tablets. Administration can be systemic or local.

[0182] Recombinant virus or vector nucleic acids are administered in any suitable manner, preferably with pharmaceutically acceptable carriers. Pharmaceutically acceptable carriers are determined in part by the particular composition being administered, as well as by the particular method used to administer the composition. Accordingly, there is a wide variety of suitable formulations of pharmaceutical compositions of the present disclosure.

[0183] Preparations for parenteral administration include sterile aqueous or non-aqueous solutions, suspensions, and emulsions. Examples of non-aqueous solvents are propylene glycol, polyethylene glycol, vegetable oils such as olive oil, and injectable organic esters such as ethyl oleate. Aqueous carriers include water, alcoholic/aqueous solutions, emulsions or suspensions, including saline and buffered media. Parenteral vehicles include sodium chloride solution, Ringer's dextrose, dextrose and sodium chloride, lactated Ringer's, or fixed oils. Intravenous vehicles include fluid and nutrient replenishers, electrolyte replenishers (such as those based on Ringer's dextrose), and the like. Preservatives and other additives may also be present such as, for example, antimicrobials, anti-oxidants, chelating agents, and inert gases and the like.

[0184] Formulations for topical administration may include ointments, lotions, creams, gels, drops, suppositories, sprays, liquids and powders. Conventional pharmaceutical carriers, aqueous, powder or oily bases, thickeners and the like may be necessary or desirable.

[0185] Compositions for oral administration include powders or granules, suspensions or solutions in water or non-aqueous media, capsules, sachets, or tablets. Thickeners, flavorings, diluents, emulsifiers, dispersing aids or binders may be desirable.

[0186] Some of the compositions may potentially be administered as a pharmaceutically acceptable acid- or base-addition salt, formed by reaction with inorganic acids such as hydrochloric acid, hydrobromic acid, perchloric acid, nitric acid, thiocyanic acid, sulfuric acid, and phosphoric acid, and organic acids such as formic acid, acetic acid, propionic acid, glycolic acid, lactic acid, pyruvic acid, oxalic acid, malonic acid, succinic acid, maleic acid, and fumaric acid, or by reaction with an inorganic base such as sodium hydroxide, ammonium hydroxide, potassium hydroxide, and organic bases such as mono-, di-, trialkyl and aryl amines and substituted ethanolamines.

[0187] Administration can be accomplished by single or multiple doses. The dose required will vary from subject to subject depending on the species, age, weight and general condition of the subject, the particular nucleic acid or recombinant virus being used and its mode of administration. An appropriate dose can be determined by one of ordinary skill in the art using only routine experimentation. The three viral vectors can be administered simultaneously or separately. If administered separately, the time between delivery of each virus can vary between seconds, minutes, days, weeks and months between each administration.

[0188] Provided herein are pharmaceutical compositions which include one or more viral vectors, alone or in combination with a pharmaceutically acceptable carrier. Pharmaceutically acceptable carriers include, but are not limited to, saline, buffered saline, dextrose, water, glycerol, ethanol, and combinations thereof. The carrier and composition can be sterile, and the formulation suits the mode of administration. The composition can also contain minor amounts of wetting or emulsifying agents, or pH buffering agents. The composition can be a liquid solution, suspension, emulsion, tablet, pill, capsule, sustained release formulation, or powder. The composition can be formulated as a suppository, with traditional binders and carriers such as triglycerides. Oral formulations can include standard carriers such as pharmaceutical grades of mannitol, lactose, starch, magnesium stearate, sodium saccharine, cellulose, and magnesium carbonate. Any of the common pharmaceutical carriers, such as sterile saline solution or sesame oil, can be used. The medium can also contain conventional pharmaceutical adjunct materials such as, for example, pharmaceutically acceptable salts to adjust the osmotic pressure, buffers, preservatives and the like. Other media that can be used with the compositions and methods provided herein are normal saline and sesame oil.

### VI. Transgenes

[0189] Subtractive transgenics allows for predictable, highly-selective expression of a transgene in animals, including humans. Subtractive transgenics can be applied by generating transgenic animals. Alternatively, through the use of viral vectors, subtractive transgenics can be used with whole organisms, without the requirement for generating and crossing transgenic animals. The selected transgene can be any molecule whose expression is desired in a specific population or sub-population of cells. The transgene can be, or encode, any type of molecule, including, but not limited to, a therapeutic molecule, a silencer, an inhibitory RNA, a dominant negative molecule, a toxin, a pro-apoptotic molecule, a wild-type gene, or a marker or reporter gene. The transgene can also encode viral accessory or packaging proteins that enable the production of lytic virus.

[0190] A therapeutic molecule is any molecule that prevents, treats or ameliorates a disease, condition or disorder (such as a genetic disorder, infection or cancer). In one embodiment, a therapeutic molecule is a wild-type version of a mutated gene or protein involved in a particular disease or condition. For example, in the case of cystic fibrosis, subtractive transgenics can be used to selectively express a wild-type version of the CFTR gene, which is defective in these patients. As another example, a significant number of cancerous cell types express a mutated form of a tumor suppressor gene, such as p53. Subtractive transgenics can be used to selectively express a wild-type version of the tumor suppressor gene in cancer cells.

[0191] In some embodiments, the therapeutic molecule is a silencer. As described herein, silencers include any number of different types of molecules, including toxins, inhibitory RNA, and dominant negative proteins.

[0192] A toxin includes any molecule that causes a toxic response (such as cell death) in the population of cells in which it is expressed. Toxins are usually proteins that are capable of causing disease by interacting with biological macromolecules such as enzymes or cellular receptors. Toxins include, but are not limited to botulinum toxin, tetanus toxin and diphtheria toxin.

[0193] In another embodiment, the therapeutic molecule is a pro-apoptotic molecule. A pro-apoptotic molecule would serve a therapeutic purpose, for example, for the treatment of a condition in which cell death is the goal, such as cancer or other hyperproliferative disease, or an infection. Using the methods described herein, pro-apoptotic molecules can be specifically delivered to the selected cells to induce cell death. Pro-apoptotic molecules are well known in the art and include, for example, caspases. Caspases are generally divided into two groups, initiator caspases and effector caspases. Initiator caspases, which include caspase-1, caspase-2, caspase-8, caspase-9, caspase-10 and caspase-12, cleave inactive pro-forms of effector caspases, thereby activating. Effector caspases, which include caspase-3, caspase-6, caspase-7 and caspase-14, cleave other protein substrates within the cell resulting in the apoptotic process. Two other known caspases, caspase-4 and caspase-5, are unclassified. Other pro-apoptotic molecules include granzyme B, Fas and Fas ligand, Bcl-2 and Bcl-X (and related pro-apoptotic family members), ceramide, second mitochondria-derived activator of caspases (SMAC) proteins, tumor necrosis factor and death domain containing molecules.

[0194] Marker and/or reporter proteins are well known in the art. Such markers or reporters include, but are not limited to green fluorescent protein (or other types of fluorescent marker proteins), chloramphenicol acetyltransferase or luciferase.

### VII. Kits

[0195] Also provided herein are kits comprising nucleic acid components for use with subtractive transgenics, which are provided and described herein. In one embodiment, the kit comprises (1) a first viral vector comprising a nucleic acid encoding a recombinase operably linked to a nucleic acid encoding a first selective promoter; (2) a second viral vector comprising a nucleic acid encoding a transcription factor operably linked to a nucleic acid encoding a second selective promoter; and (3) a third viral vector comprising a transgene under the transcriptional control of a response element specific for the transcription factor.

[0196] Also provided are kits comprising nucleic acids for the generation of subtractive transgenic animals. Such kits can include injection constructs for the production of a transgenic animal. In one embodiment, the kit comprises (1) a first injection construct comprising a nucleic acid encoding a recombinase operably linked to a first selective promoter; (2) a second injection construct comprising a nucleic acid encoding a transcription factor operably linked to a second selective promoter, wherein expression of the transcription factor is regulated by expression of the recombinase; and (3) a third injection construct comprising a transgene under the transcriptional control of a response element specific for the transcription factor.

[0197] In one embodiment, the second injection construct comprises the nucleotide sequence of SEQ ID NO: 22. In another embodiment, the second injection construct comprises the nucleotide sequence of SEQ ID NO: 23. In another embodiment, the second injection construct comprises the nucleotide sequence of SEQ ID NO: 24. In another embodiment, the second injection construct comprises the nucleotide sequence of SEQ ID NO: 25. In another embodiment, the second injection construct comprises the nucleotide sequence of SEQ ID NO: 26. In another embodiment, the second injection construct comprises the nucleotide sequence of SEQ ID NO: 27.

[0198] The following examples are provided to illustrate certain particular features and/or embodiments. These examples should not be construed to limit the disclosure to the particular features or embodiments described.

### EXAMPLES

### Example 1

### Granule Cell Specific Expression of a Transgene

[0199] In one particular example, a transgene is expressed exclusively in the granule cells of the dentate gyrus. The hippocampal circuit is essentially a loop from entorhinal cortex to dentate gyrus; dentate to CA3; CA3 to CA1; CA1 to subiculum (or subicular complex); and subiculum (and CA1) back to entorhinal cortex (see, for example, Witter et al. Ann. N.Y. Acad. Sci. 911:1-24, 2000). While this describes the majority of synapses in the hippocampal formation, recent evidence has underscored that some of the “minority” connections (particularly entorhinal to CA1) may play a much more important role than previously thought (see, for example, Brun et al. Science 296(5576):2243-6, 2002). The most direct way to see what each major neural circuit element does is to specifically and reversibly ablate it while recording from downstream elements, as one would any other circuit.

[0200] Subtractive transgenics can be used to produce a dentate granule cell-specific inducible silencer mouse, in which it is possible to implant electrodes and monitor specific regions (for instance, CA1) while the transgene is off (either with or without doxycycline, for tTA and rtTA, respectively). After stable baseline recordings of CA1 pyramidal cells (for example, “place cells” and “theta” cells) are obtained, doxycycline is added to the diet, thereby initiating the expression of the silencer transgene in dentate granule neurons. In this way, the relative contribution of the firing of granule cells to the firing of CA1 pyramidal cells can be determined. This same line can also be used to analyze the relative contribution of granule cells to other parts of the neural circuit, including CA3 and/or entorhinal cortex, simply by switching the recording site. Furthermore, unit recordings are only one of the many approaches one could take with such animals. Extracellular field recordings before and after transgene induction can also be performed (for example, to elucidate the role of granule cells in theta and gamma-band oscillations), as can current-source-density (CSD) analysis (for example, with multisite recordings such as silicon probes).

[0201] In this example, known anatomical variability in lines of mice expressing transgenes under the control of the CamKIIα promoter is utilized in the context of the subtractive transgenic technique to produce transgenic animals that express specifically in the granule cells of the dentate gyrus. Due to the widespread use of the CamKIIα promoter, there are many different lines available that express Cre in overlapping sets of neural cells, including the granule cells of the dentate gyrus.

[0202] The basic ftTA construct is illustrated in FIG. 4. The ftTA construct was derived from the pMM403 CamKIIα plasmid (Bejar et al. J. Neurosci. 22(13):5719-26, 2002) by flanking it with symmetrical loxp sites in mutagenic PCR reactions with a high-fidelity polymerase. The loxp primers both had Not I linkers, while the internal primers were designed to enable the directional cloning of the floxed ends into the tTA construct. The ftTA construct was then ligated into the Not I site of pMM403. The construct for pronuclear injection was created by cutting this plasmid with SfiI and gel-purifying the relevant (upper) band.

[0203] Several lines were established from different transgene positive founder animals using this construct. Non-radioactive in situ hybridization on seven of these lines with ˜600 bp digoxygenin-labeled riboprobes transcribed from the injection construct demonstrated that anatomical variability in expression pattern similar to that previously reported is obtained. Individual lines differ in their expression patterns in neuronal subtypes in the hippocampus, cortex, and striatum.

[0204] FIG. 5 shows in situ hybridizations of a subtractive pair of transgenic lines of mice both made with the CaMKII promoter demonstrating proof of principle: increased anatomical specificity via Cre-mediated subtraction. FIG. 5A illustrates the tTA expression (“unsubtracted”) under control of the CaMKII promoter in a transgenic line, with very strong labeling of the principal cells of the entire hippocampus (up and down arrows), and moderately strong labeling in two sets of cortical pyramidal neurons (left and right arrows). FIG. 5B shows the anatomical distribution of Cre in the “subtractor” Cre line, with weak labeling throughout the hippocampus, and no detectable cortical label. FIG. 5C demonstrates the results of crossing these two lines: the strong hippocampal labeling is almost entirely “subtracted.” In the subtracted animals tTA expression is present only in the cortical neurons. Crossing of these subtracted animals to a tetO line produces transgenic animals that are capable of expressing any transgene of interest under the control of the tetO response element only in the cortical neurons.

[0205] Another example demonstrating the advantage provided by anatomical variability of the CamKIIα promoter is shown in FIG. 16. In this example, one transgenic line comprises Cre under control of the CamKIIα promoter and another line comprises ftTA under control of the CamKIIα promoter. In the unsubtracted line (ftTA⁺/Cre⁻), expression of tTA is detected in all primary neurons (CA1, CA2, gc and hilus). In the subtracted line (ftTA⁺/Cre⁺), Cre expression is detected only in CA3 cells. Thus, subtraction results in expression of tTA in all primary neurons except CA3 (see FIG. 16C).

### Example 2

### Expression in Subsets of Cholinergic Neurons Using Variants of the Choline Acetyltransferase Promoter

[0206] In order to demonstrate selectivity using a selected promoter pair, two variants of the choline acetyltransferase (Chat) promoter were selected that have an overlapping expression pattern in a subset of cholinergic neurons. Chat is an enzyme involved in the biosynthesis of acetylcholine, and is expressed only in cholinergic neurons. Cholinergic input arising from the basal forebrain nuclei plays a key role in neuromodulation of the telencephalon, and is thought to be involved with memory, arousal and attention. Loss of central cholinergic tone has been hypothesized to be involved with age-related cognitive decline. Thus, a promoter specific to those particular cholinergic nuclei would be of great general interest. However, the native Chat promoter expresses in every cholinergic neuron in the body, including key brainstem nuclei and spinal motor neurons involved in movement. The native Chat promoter is therefore of limited utility since memory tasks in animal models are frequently involve behavioral tasks with a substantial motor component and it would be difficult to get adequate behavioral data out of an animal with silenced motoneurons.

[0207] Because not every 5′ BAC clone recapitulates the native expression pattern (Gong et al. Nature 425(6961):917-25, 2003), it is possible to select particular promoter clones that consistently yield somewhat different expression patterns. For example, two Chat promoter BAC clones yield expression in different (overlapping) cholinergic neurons. BAC RP23-431D19 yields a recapitulation of the native expression pattern, whereas BAC RP23-51F19 yields an incomplete and ectopic expression pattern. In combination, these two BAC promoter clones can be used to produce subtractive transgenic lines that express a transgene in cholinergic neurons of the basal forebrain and striatum, but not in critical motoneurons and brainstem cholinergic neurons.

[0208] To produce such subtractive transgenic lines, a Chat ftTA cassette is inserted into BAC RP23-431D19, and a Cre cassette is inserted into BAC RP23-51F19 as illustrated in FIG. 6. The ftTA cassette is created in a shuttle vector (such as a BLUESCRIPT™ vector from Stratagene). First, the tTA fragment EcoRI-BamHI from pTet-Off (Clontech) is inserted in BamHI and EcoRI sites of pBluescript (plasmid SK-tTA). Then, two oligonucleotides incorporating the LoxP sites are added. A first oligonucleotide (Oligo Lox1) is designed to have the following sequence: KpnI-AscI-AvaI-LoxP-ApaI-HindIII. The second oligonucleotide (Oligo LoxP2) has the sequence EcoRV-SpeI-LoxP-XhoI-NotI-EcoRI. The Oligo Lox1 is digested with KpnI and HindIII and inserted in the same sites of the SK-tTA. The Oligo Lox2 is digested by SpeI and NotI and inserted in the same sites of the SK-tTA. Finally, the IRES-Red is extracted from the pIRESII-red2 plasmid by BamHI and SspI and inserted in the SpeI blunted, BamHI sites of the construct. The cassette LoxP-tTA-IRESRed-LoxP is extracted by AscI, XhoI blunted and inserted into AscI, Sma sites of pLD53.SCA-E-B. Alternatively, IRES-red2 is not inserted and the Lox-tTA-Lox fragment is cloned directly into pLD53.RecA-EGFP. These shuttle vectors (pLD53-ftTA-Red-EGFP and pLD53-ftTA-EGFP plasmids) are then used as cassettes for incorporation into promoter specific BAC shuttle vectors.

[0209] Two polynucleotide sequences of upstream and downstream portions of genomic DNA, designated boxes A and B (FIG. 6), are amplified using PCR from a selected BAC promoter clone. The boxes are provided by PCR of the BAC clone of interest. The PCR primers for box A are designed so the 5′ primer incorporates an AscI site and the 3′ primer doesn't incorporate anything. The PCR product is purified and digested by AscI and inserted into a NotI-blunted AscI digested pLD53-ftTA-Red-EGFP (or pLD53-ftTA-EGFP) plasmid. The B box PCR is designed so that the 5′ primer incorporates a PacI site and the 3′ primer incorporates a FseI site. The PCR product is then purified and digested by PacI and FseI and inserted into the pLD53-ftTA-Red-EGFP (or pLD53-ftTA-EGFP) digested by the same enzymes. These vectors, containing the A box and B box specific for the promoter of interest represent the BAC shuttle vectors that are going to be used for electroporating the BAC of interest.

[0210] FIG. 7A illustrates the strategy for obtaining the transgenic BACs. The protocol is based on that described by the GENSAT project. In brief, the BAC shuttle vectors are electroporated into the corresponding BAC host cells. Co-integrates are selected in culture using ampicillin and chloramphenicol. The correct co-integrates are analyzed by Southern blots and then a resolution step is performed on these clones by the use of chloramphenicol and sucrose (negative selection). The BACs obtained are then purified prior to microinjection to produce transgenic animals.

[0211] When a ftTA transgenic line is crossed with a Cre expressing line, progeny are produced that express the two transgenes in an overlapping set of cells (FIG. 7B). In the example described above, the vectors are designed so that the red fluorescent protein can be detected in the transgenic animals, before removal of the ftTA and GFP (green florescence) can be detected in cells where the tTA cassette is removed after crossing with a Cre animal.

[0212] Progeny from the cross that possess both ftTA and Cre transgenes are capable of expressing a transgene in motoneurons and brainstem nuclei in a subtracted pattern (relative to either promoter), enabling the study of cholinergic neurons in the forebrain alone without disruption of essential motor functions. Such a subtractive transgenic animal is useful, for example, for producing animal models of Alzheimer disease (such as by expressing a transgene that is a silencer construct or a particular gene involved in Alzheimer disease, for example, amyloid precursor protein (APP) or a presenilin).

### Methods for Generating the ChAT-ftTA Construct

[0213] ChAT-ftTA was generated according to similar procedures as described for the Drd4 injection construct (see Example 4). Details of the methods for generating ChAT-ftTA are as follows.

Subcloning the A box into the pBSloxPtTAloxP (pBSftTA)

[0214] The A box was amplified out of the BAC RP23-246B12 using the ChATAbox5′ AscI and ChATAbox3′FseI primers. The product was purified and ligated into pBSftTA using the restriction sites AscI and FseI mutagenized by the primers into the ends. The positive clones were screened using PCR for the A box primers. The products were sequenced using the T3 (SEQ ID NO: 7) and T7 (SEQ ID NO: 8) primers.

Subcloning the AboxftTA Cassette into the Shuttling Vector

[0215] The cassette was transferred into the vector pLD53.SC-AB_MCS (a modified vector based on the pLD53.SC-AB with an inserted multiple cloning site) using the AscI and XhoI sites to construct the recombination cassette. The ligation was screened using PCR with the A box and tTA primer sets, and restriction digests. One positive clone was selected for homologous recombination after confirmation by sequencing using the RecA_{—}7023Fwd (SEQ ID NO: 9) and EGFP_{—}150Rev primers (SEQ ID NO: 10).

### Recombination

[0216] Recombination was performed according to the same protocol as described for Drd4 (see Example 4). Thirty-six colonies were picked and screened using PCR with the tTA primers. The 16 colonies exhibiting the strongest positive signal were selected and screened using Southern blotting with a radiolabeled ChAT A box probe. One of the colonies showed the expected pattern of the recombinant (see FIG. 11). The BAC was sequenced and prepared for injection.

### Preparation of Injection Construct

[0217] The injection buffer for BAC transgenesis (10 mM tris, pH 7.5, 0.1 mM EDTA, 100 mM NaCl) was prepared and filtered using a 0.2 mm filter. The DNA was diluted into the injection buffer to a concentration of 0.5 ng/μl. The diluted DNA was then purified using drop dialysis using nitrocellulose microdialysis membranes (Millipore, Inc.). The nucleotide sequence of the ChAT_ftTA injection construct is set forth as SEQ ID NO: 22.

### Example 3

### Transgene Expression in the Prefrontal Cortex

[0218] The prefrontal cortex (PFC) connects extensively with areas of the brain involved in processing external (sensory and as motor cortices) and internal (limbic and midbrain structures) information. The neurons of the PFC are activated by all types of sensory stimuli, before and during different actions, with regard to past memories, and in anticipation of future events. Neurons of the PFC are also affected by attention and motivational state (Miller and Cohen, Annu. Rev. Neurosci. 24:167-202, 2001). Therefore, the PFC has been implicated in controlling abstract information needed for intelligent behavior (Miller et al. Philos. Trans. R. Soc. Lond. B. Biol. Sci. 357(1424):1123-1136, 2002). Although the role of PFC remains largely unclear, it has been hypothesized that schizophrenia results from improper gating of information flow in the prefrontal cortex (Seamans and Yang, Prog. Neurobiol 74(1):1-58, 2004).

[0219] The principal neurons of the prefrontal cortex receive dopaminergic innervation from the midbrain ventral tegmental area. This dopaminergic innervation may be responsible for the association of tasks (and therefore rules for the task) with rewards in order to reinforce the pattern of activity responsible for attaining a goal. The dopaminergic innervation necessitates the expression of the dopamine receptor D4 (Drd4) in the principal neurons of the PFC. Expression of Drd4 in the PFC has been demonstrated (Gong et al. Nature 425(6961):917-925, 2003; Noain et al. Eur. J. Neurosci. 24(9):2429-2438, 2006), particularly in the orbital, prelimbic, cingulate and rostral agranular portions.

[0220] Using the drd4 promoter, lines of mice can be developed that express a transgene, such as a silencer construct (or other gene of interest) in pyramidal neurons (D4 dopamine receptor expressing neurons) of the prefrontal cortex. Silencers have the advantage of both spatial specificity (inactivation of only a specific neuron type, in location and function) and temporal specificity (neurons can be deactivated or ‘silenced’ during experiments only, and can be reverted back to normal afterwards). However, the drd4 promoter alone also promotes expression in retinal ganglion cells, potentially blinding the animals. Using a subtractive strategy one can subtract retinal expression simply by crossing an ftTA drd4 line to a retinal Cre line, such as Chx10_Cre. Such a cross produces progeny that are relevant animal models for normal and pathological function of the prefrontal cortex. For example, a model of the negative symptoms of schizophrenia can be produced by expressing a silencer construct in the D4 expressing neurons of prefrontal cortex.

[0221] To avoid problems associated with retinal expression, a subtractive transgenics strategy can be implemented by crossing a drd4 ftTA line with one of several available lines expressing Cre from a retina-specific promoter (such as those described by Furuta et al. Genesis. 26(2):130-2, 2000; Akimoto et al. Invest. Opthalmol. Vis. Sci. 45(1):42-7, 2004; Li et al. Genesis 41(2):73-80, 2005; as well as several produced by the GENSAT project). Progeny with both the ftTA and Cre transgenes do not express a tetO regulated transgene in the retina but retain expression of such a transgene in the prefrontal cortex, an area of enormous interest in the both cognitive and clinical sense.

### Example 4

### Drd4 Promoter Constructs for Prefrontal Cortex Studies

### BACKGROUND

### Preparation of the tTA Line

[0222] In order to achieve stable expression using a native promoter, it is advantageous to mimic physiological conditions as much as possible. The promoter elements of a particular gene are most commonly present within the 10 kb upstream region, but may be much further upstream or even downstream. Because of this, there is often variable gene expression when using minimal promoter constructs, showing mosaic patterns due to incomplete expression or leaky expression, or both. While that is useful for obtaining different patterns of expression using the same construct, it is not desirable when trying to express the construct exactly where a gene, Drd4 in this case, is expressed. Therefore, to better mimic physiological conditions, tTA can be driven by the Drd4 promoter in an environment very similar to that experienced by the Drd4 gene, such as by using a BAC-based construct (Gong et al. Nature 425(6961):917-925, 2003).

### Building the Recombination Cassette

[0223] Since the BACs are extremely large and contain multiple sites for each restriction enzyme, subcloning through restriction digests and subsequent ligation is not feasible. However, one suitable technique is homologous recombination, wherein a part of the sequence from the BAC is replicated onto the recombination cassette. In case of transfer into the BAC, two recombination sites or one recombination site can be used. In this example, one recombination site was used, termed the “A box”. For recombination into BACs, a special type of vector, called a shuttle vector, is used to carry the recombination cassette. The shuttle vector used for generating the Drd4 constructs was pLD53.SC-AB (Gong et al. Genome Res. 12(12):1992-1998, 2002, incorporated by reference herein). The recombination cassette also contains the tTA gene and loxP sites on either side of tTA. The loxP sites were designed as single stranded oligonucleotides that, when joined, would have restriction sites at the ends for subcloning. The pBluescript II KS+ (Stratagene, Inc.) was used as the basic cloning vector. The mammalianized tTA was extracted from the pTetOff plasmid (Clontech, Inc.). After inserting the loxP sites, tTA and the A box into pBluescript II KS+, the construct was excised and inserted in the shuttle vector by subcloning. The resulting recombination cassette with A box and ftTA (tTA flanked by loxP sites) was used for homologous recombination.

Homologous Recombination into BACs

[0224] The BACs contained chloramphenicol resistance and the plasmid contained ampicillin resistance. The BACs were in DH10β cells, which were made electrocompetent. Transforming the DH10β cells with purified recombination plasmid results in insertion of the plasmid into the cells. The cells were allowed to grow in medium containing both ampicillin and chloramphenicol. If the plasmid is not incorporated, the cell dies as it doesn't have any resistance to ampicillin from the BAC it contains. If the plasmid is taken into the cell, but does not recombine with the BAC, the cell survives, but does not multiply because the plasmid cannot be replicated (pLD53.SC-AB contains a R6Kγ origin of replication and therefore, cannot replicate in the pir⁻DH10β cells (Filutowicz and Rakowski, Gene 223(1-2):195-204, 1998)). The cell will only survive and multiply if the plasmid is integrated into the BAC. pLD53.SC-AB contains the RecA gene which causes highly efficient homologous recombination as shown by Gong et al. (Genome Res. 12(12):1992-1998, 2002). Integration in the presence of RecA usually occurs in the correct position (i.e., recombination should be homologous), which is downstream of the Drd4 promoter (as specified by the A box) such that the tTA is regulated by it.

### Screening for Successful Co-Integrates

[0225] Successful co-integrates contain the Drd4 promoter, followed by the A box region, followed by the ftTA insert and part of the shuttle vector, at least up to the β-lactamase gene. Co-integrates can be identified using such techniques as PCR and Southern blot, designed to differentiate between the native and recombinant BACs. For PCR detection, primers are designed such that the forward primer is present on the BAC and the reverse primer is present either (a) on the BAC downstream of the A box sequence, or (b) on the recombination cassette downstream of the A box. The PCR using (a) will amplify only in BACs having no insert and the PCR using (b) will amplify only in BACs with the correct insert at the correct site. This is illustrated in FIG. 8. The forward primer used was Drd4_{—}5′i (SEQ ID NO: 11) and the reverse primers were Drd_gene_rev (a) (SEQ ID NO: 12) and pLD800_rev (b) (SEQ ID NO: 13). For screening by Southern blot, the probes used corresponded to an 800 bp sequence upstream of the A box (Drd4_{—}5′) and a 700 bp sequence in the tTA (tTA). The BAC DNA was digested using a restriction enzyme that cuts only upstream of the Drd4_{—}5′ sequence and some distance downstream of the 3′-terminus of the A box. The Drd4_{—}5′ probe binds to a long fragment of DNA that is specific (7142 bp) and the tTA probe will not bind at all to the native BAC. However, in case of homologous recombination, the insert is interposed in between the two sites of the restriction enzyme, and brings with itself another restriction site that cuts up the ˜7 kb band into smaller fragments. Thus, the hybridization of the Drd4_{—}5′ probe is to a smaller fragment (see FIG. 9).

### Materials & Methods

### Bacterial Strains

[0226] Three strains of E. coli were used in the study. For the replication of plasmids based on pBluescript, the DH5α strain was grown and maintained as ultracompetent stocks at −80° C. using the TSS protocol (Chung et al. Proc. Natl. Acad. Sci. U.S.A. 86(7):2172-2175, 1989). E. coli DH5α was grown in the presence of ampicillin (100 μg/ml). For plasmids based on pLD53.SC-AB, pir2 ultracompetent cells (Invitrogen, Inc.) were used and ampicillin (100 μg/ml) was used for selection. For BACs, DH10β cells containing the BAC were used. DH10β cells were grown in presence of chloramphenicol (12.5 μg/ml).

### Transformation of Bacterial Strains

[0227] The DH5α and pir2 chemically competent cells were transformed with 30 ng circular DNA and approximately 90 ng ligation product. The cells were incubated for 30 minutes, followed by addition of 900 μL of SOC. The cells were allowed to recover for 1 hr at 37° C. and 100 μl of the mixture was plated on LB plates containing ampicillin and the rest of the mixture was spun down at 10,000 rpm for 30 seconds. The supernatant was discarded except for 100 μl. The cells were resuspended and plated. The plates were incubated for 16 hours at 37° C. and examined.

[0228] The DH10β cells containing the BACs were made electrocompetent and transformed with shuttle vector pLD53.SC-AB containing the recombination cassette according to the protocol described by Gong et al. (Genome Res. 12(12):1992-1998, 2002).

### Plasmid Isolation

[0229] The alkaline lysis method was used for the isolation of plasmid for screening of colonies. Approximately 1.6 ml of a stationary phase culture was spun for 2 minutes in a microcentrifuge at 14,000 rpm at 4° C. The cell pellet was resuspended in 100 μl of resuspension buffer (25 mM Tris-Cl, 50 mM glucose, 10 mM EDTA at pH 8.0) by vortexing. To this suspension, 200 μl of lysis buffer (0.2N NaOH, 1% v/v SDS) was added and the mixture was kept at room temperature for less than 5 minutes. To the lysate, 150 μl of neutralization buffer (3M potassium acetate, glacial acetic acid, pH 5.5) was added and the mixture was kept on ice for 10 minutes. Then 450 μl 5M LiCl was added and the mixture was kept on ice for 10 minutes. The cell debris containing chromosomal DNA was precipitated by spinning the suspension for 10 minutes in a microcentrifuge at 14,000 rpm. The supernatant containing plasmid DNA was precipitated with 650 μl isopropanol and then with 1 ml 70% ethanol. The final pellet was dissolved in 50 μl water.

[0230] For growing up plasmid stocks and for subsequent sequencing and ligation steps, plasmid was prepped from 100 ml of overnight cultures (incubated at 37° C.) using Qiagen Midiprep kit according to the manufacturer's protocol. The DNA was resuspended in distilled water.

### Restriction Endonuclease Digestion of DNA Fragments and Cloning in Plasmid Vectors

[0231] Restriction digests for preparing insert and vector for ligations were performed using endonucleases (New England Biolabs, Inc.) according to the manufacturer's protocol. DNA was digested in a total volume of 100 μl for 2 hours. Restriction digests for screening of colonies were performed using variable amounts of plasmid prep (100-500 ng) in a volume of 20 μl for 1 hour.

### Visualization of DNA Bands Using Agarose Gel Electrophoresis

[0232] The plasmid DNA following restriction digestion, and before ligation, was visualized on 0.8% agarose gels using Tris-acetate-EDTA buffer, with 0.5 μg/ml ethidium bromide, and using 0.5 ng 1 kb DNA ladder (New England Biolabs, Inc.). The BAC DNA was visually compared to a λ-HindIII ladder (New England Biolabs, Inc.). The PCR products were compared using a 100 bp ladder (New England Biolabs, Inc.) on a 1% agarose gel. The DNA was visualized and quantified using the Gel documentation system (Biorad Laboratories, Inc) by comparison with the DNA ladder.

Extraction of DNA from Agarose Gel

[0233] The agarose pieces containing DNA bands were excised under long-wave UV illumination. The agarose blocks were run in a perpendicular direction in the same buffer in dialysis bags to run the DNA off the gel, and the DNA was extracted from the buffer using Elutip-D minicolumns (Schleicher & Schuell, Inc.), according to the manufacturer's protocol. The eluate in high-salt buffer was then precipitated with ethanol.

TABLE 1
Primer and Oligonucleotide Sequences

| | | | |
|---|---|---|---|
| | | SEQ | |
| Primer Name | Sequence* | ID NO: | Application |

| | | | |
|---|---|---|---|
| DrdABox5′AscI | CAGCTAGCAGGGCGCGCCGCACTGA | 1 | Primers used for the |
| | CTGATGGAGACTTGGGAAGAGAG | | amplification of the A box |
| DrdABox3′FseI | GAATTCGGCCGGCCTGCCACTGCTG | 2 | fragment from the BAC |
| | AACCCGCTCCGGGAGGCGC | | vector RP-23 1 34L4 |
| loxP 1 | CACGGCGCGCCTAGGCCGGCCATAA | 3 | The two oligonucleotides |
| | CTTCGTATAGCATACATTATACGAA | | annealed together were used |
| | GTTATGTTTAAACACCCTGCAGGAG | | for the construction of the 5′ |
| | GGGCCCACA | | loxP site along with |
| loxP1bis | AGCTTGTGGGCCCCTCCTGCAGGGTG | 4 | restriction sites to facilitate |
| | TTTAAACATAACTTCGTATAATGTA | | cloning |
| | TGCTATACGAAGTTATGGCCGGCCT | | |
| | AGGCGCGCCGTGGTAC | | |
| loxP2 | ATCAGACTAGTACGCGATCGCTAAT | 5 | The two oligonucleotides |
| | AACTTCGTATAGCATACATTATACG | | annealed together were used |
| | AAGTTATATTTAAATACCTCGAGAG | | for the construction of the 3′ |
| | GCGGCCGCATG | | loxP site along with |
| loxP2bis | AATTCATGCGGCCGCCTCTCGACGTA | 6 | restriction sites to facilitate |
| | TTTAAATATAACTTCGTATAATGTA | | cloning |
| | TGCTATACGAAGTTATTAGCGATCG | | |
| | CGTACTAGTCTGAT | | |
| T3 | AATTAACCCTCACTAAAGGG | 7 | Primers used for screening |
| T7 | GTAATACGACTCACTATAGGGCG | 8 | and sequencing inserts |
| | | | subcloned into pBluescript II |
| | | | KS+ |
| RecA_7023fwd | CGAAAACGTGGTGGGTAGCGAAACC | 9 | Primers used for screening |
| | CGCG | | and sequencing inserts |
| FGFP_150rev | CGCCCTCGCCGGACACGCTGAAC | 10 | subcloned into pLD53.SC- |
| | | | AB |
| Drd4_5′i | GACTGGGCCTTGGAGGTGCC | 11 | Primers used for screening of |
| Drd4_gene_rev | CAGCCAGGCTCACGATGAAG | 12 | recombinants by PCR from |
| pLD800_rev | CACCTAGCTTCTGGGCGAGTTTACG | 13 | native BAC |

*The bases in bold are the actual sequences cloned within the flanking restriction sites

TABLE 2
Cloning vectors and recombinant plasmids

| Vector | Description | Source |
|---|---|---|
| pBluescript II KS+ | Basic cloning vector containing multiple cloning site and | Stratagene, Inc. |
| | galactose gene for blue-white selection. | |
| pTetOff | Source of mammalianized tetracycline trans-activator | Clontech, Inc. |
| | (tTA) in the construct. | |
| pLD53.SC-AB | Shuttle vector containing RecA gene for high-efficiency | Dr Nathaniel Heintz, |
| | homologous recombination into BACs and R6kγ origin | Rockefeller |
| | of recombination that necessitates pir gene to be | University |
| | produced by the host bacteria for replication. | |
| RP-23 134L4 | BAC initially used for homologous recombination (see | Children's Hospital |
| | Gong et al., 2003). | Oakland Research |
| RP-23 320N24 | BAC used for the final successful homologous | Institute (CHORI) |
| | recombination. Both the lines of BAC are from the BAC | |
| | DNA library of mouse genome as constructed by Pieter | |
| | de Jong's lab at CHORI. | |

### Ligation of DNA Fragments

[0234] The ligations into plasmid vectors were performed using T4 DNA ligase (New England Biolabs, Inc.) using 150 fM of insert and 30 fM of vector DNA. Ligation mixtures were incubated in a volume of 20 μl overnight in a 16° C. bath. Half the volume of ligants was transformed the next day and simultaneously replica-plated, inoculated in minicultures and screened using PCR amplification.

### Polymerase Chain Reaction (PCR)

[0235] For screening, PCR was carried out in a total volume of 25 μl in 1× Thermopol buffer (New England Biolabs), containing 20 to 50 ng template DNA, 25 pM of each primer, 0.2 mM of each dNTP (Fermentas, Inc.), and 1 μl of Taq polymerase in a thermocycler (icycler, Biorad Laboratories, Inc). The amplification of A box fragments was performed using Herculase hi-fidelity polymerase (Stratagene, Inc.).

### DNA Sequencing

[0236] For direct sequencing of the plasmid DNA, 300-600 ng template was combined with 7 pM primer and the volume made up to 13 μl. The sequencing reaction was carried out in MJ 4-engine thermocyclers and the samples were analyzed in the 3130XL 16-capillary Genetic Analyzer (Applied Biosystems, Inc.). For sequencing of BAC DNA, 1 μg template DNA was provided.

### Dot-Blot Hybridization for Screening Successful Colonies

[0237] For screening positive ligants following the ligation of the A box ftTA cassette from cloning vector to shuttle vector, radioactive colony lifts were used. From the original plate containing transformants, discrete colonies were replica-plated onto twin 15 cm-diameter plates of LB agar containing 12.5 μg/ml chloramphenicol. Colonies were directly plated onto one plate, and over a nylon membrane (Hybond+ circular nylon membrane, Amersham Biosciences plc) on the other plate. The nylon membrane was then denatured using 0.5 N NaOH and 1.5 M NaCl solution and neutralized using 0.5 M Tris-Cl and 1.5 M NaCl solution. Proteins were removed by incubation with Proteinase K solution, followed by a wash in the neutralization solution, and baked at 80° C. for 1 hour to bind DNA. The membrane was hybridized to a radio-labeled (dCTP³²) tTA probe and finally read in a STORM Phosphorimager (GE Healthcare Life Sciences, Inc.). The replicates of the colonies successfully binding the probes were analyzed using restriction digests. One colony was selected.

[0238] For screening positive co-integrates following the first attempt of homologous recombination of BACs, the colonies were replica-plated as above, but hybridized to a Riboprobe processed by transcribing the antisense RNA to A box ftTA sequence as in pBSftTA. The DIG nonradioactive kit for random-primed labeling of riboprobes (Roche Diagnostics Corp., Inc.) was used according to the manufacturer's protocol.

### Preparation of BAC DNA

[0239] BAC DNA was prepped from overnight cultures of 5 ml using modified alkaline lysis protocol (Sambrook & Russell, Molecular Cloning: A Laboratory Manual. Cold Spring Harbor, N.Y.: Cold Spring Harbor Laboratory Press, 2001) for the purpose of Southern blot and PCR to characterize possible recombinants. For the purpose of DNA sequencing to confirm recombinants and for the preparation of injection constructs, the Nucleobond plasmid midi-kit (Clontech, Inc.) was used with twice the volumes of buffers used as compared to manufacturer's protocol for BAC/PAC and low-copy vectors, and was eluted in 200 μl water.

### Southern Blot for Characterization of Recombinants

[0240] The BAC DNA was digested using restriction endonuclease XbaI (New England Biolabs, Inc.) and run on a 0.8% agarose gel using Tris-acetate-EDTA buffer, with 0.5 μg/ml ethidium bromide and using 0.5 ng 1 kb DNA ladder and λ-HindIII ladder (New England Biolabs, Inc.). The gel was run at 90 volts in a submarine gel electrophoresis device (Biorad Laboratories, Inc) and was depurinated with 0.25 N hydrochloric acid and denatured using 0.5 N NaOH and 1.5 M NaCl solution, and neutralized using 0.5 M Tris-Cl and 1.5 M NaCl solution. The DNA was transferred onto nylon membrane (Hybond XL nylon membrane, Amersham Biosciences plc) using wet transfer in 20×SSC. The blot was crosslinked using a stratalinker and hybridized using the nonradioactive DIG-labeled kit (Roche Diagnostics Corp.) using random-primed probe. Bands were detected using CSPD chromogenic detection kit (Roche Diagnostics Corp.) and fluorescence was recorded on Kodak X-OMAT Blue autoradiography film (Perkin Elmer, Inc.) using exposures of 5, 15 and 30 minutes.

### Results

[0241] Subcloning loxP1 into pBluescript II KS+ (pBS)

[0242] The loxP1 oligonucleotide dimer was constructed by mixing loxP1 and loxP1 bis single stranded oligonucleotides and boiling them together to denature and re-anneal by gradual cooling to room temperature. LoxP1 was subcloned using the restriction sites KpnI and HindIII that had been designed into the oligonucleotide and inserting loxP 1 into the KpnI and HindIII sites of pBS. The potentially positive clones were screened using the restriction sites AhdI and AscI on the vector pBS, and the insert loxP1, respectively. The positive clone was confirmed by direct sequencing using the T3 and T7 primer sites flanking the cloning region on pBS.

Subcloning tTA into the pBSloxP

[0243] The tTA was excised out of the pTetOff using the EcoRI and BamHI sites and put into pBSloxP using those sites. The ligation product was transformed and potential positive clones were screened using the EcoRI/BamHI digest that liberates the insert and the AhdI and SnaBI sites present on the vector and the insert respectively. The clone was confirmed using the T3 and T7 sites.

Subcloning loxP2 into pBSloxPtTA

[0244] The loxP2 oligonucleotide dimer was constructed from loxP2 and loxP2bis single stranded oligonucleotides. The oligonucleotide was ligated using the NotI and SpeI sites designed into it and on the 3′ end of the tTA on the pBSloxPtTA vector. The ligation was screened by double digests using the XhoI and PmeI sites and the XhoI and ApaI sites. The ligation was screened using restriction digests and sequenced using T3 and T7 primers.

Subcloning the A box into the pBSloxPtTAloxP (pBSftTA)

[0245] The A box was amplified out of the BAC RP23-134L4 using the DrdAbox5′AscI (SEQ ID NO: 1) and DrdAbox3′FseI primers (SEQ ID NO: 2). The product was purified and ligated into pBSftTA using the restriction sites AscI and FseI mutagenized by the primers into the ends. The positive clones were screened using PCR for the A box primers and by getting a positive signal. The products were sequenced using the T3 and T7 primers.

Subcloning the AboxftTA Cassette into the Shuttling Vector

[0246] The cassette was transferred into the vector pLD53.SC-AB using the AscI and SwaI sites to construct the recombination cassette. The ligation was screened using colony lifts (see Materials and Methods), and restriction digests with FseI, XbaI, and NcoI, which have sites both in the insert and vector. One positive clone was selected for homologous recombination after confirmation by sequencing using the RecA_{—}7023Fwd (SEQ ID NO: 9) and EGFP_{—}150Rev (SEQ ID NO: 10) primers.

Homologous Recombination into BAC

[0247] The BAC initially used for recombination was RP23-134L4, as described by Gong et al. (Nature 425(6961):917-925, 2003). The BAC was made competent and transformed. The inoculum was screened using serial dilutions in double selection medium, and the colonies that grew in a plate with Chlor/Amp were selected for further screening. The colonies were screened using dot-blot with tTA riboprobe, and all 40 colonies were positive for the insert (FIG. 10A). They were screened using two sets of PCR reactions. However, all of the clones were positive for both. The PCR reaction specific for the recombinant was sequenced, and the run read all the way from the BAC to the insert, demonstrating homologous recombination. But as both the PCR reactions were positive, it meant that though the recombination cassette had been incorporated correctly there was heterogeneity of BACs in the cell, essentially a mixture of BACs, some native and some recombinant. To determine the proportion of native versus recombinant, the clones were screened using Southern blot for both tTA and Drd5′probe, as shown in FIG. 9. The potential recombinant bound to tTA (unlike the original BAC), which meant there was incorporation of insert, but the Drd5′ probe bound significantly more to the 7 kb band (native) compared to 3 kb (recombinant), as shown in FIG. 10B. The blot showed that the number of copies of native BAC in the mix was much more than the recombinant.

[0248] The next procedure used both RP23-134L4 and RP23-320N24 strains. They both contain largely overlapping parts of the mouse genome, and need the same A box sequence. Recombination was performed according to the same protocol and 48 colonies, 24 of RP23-134L4 and 24 of RP23-320N24, were picked. They were screened using double-PCR using same strategy as described herein. The colonies that exhibited positive amplification for recombinant reaction were selected. Of the RP23-134L4 colonies, none of the clones were fully negative for the native BAC reaction; thus those with fainter bands were picked. Sixteen clones in total were selected and screened using nonradioactive (DIG-labeled) Southern blot. The positive control was pLD53AboxftTA recombination vector, and the negative control was the native 320N24 BAC. The blot was hybridized to Drd4_{—}5′ probe. All of the 320N24 clones showed 3.4 kb bands (i.e., contain recombinants only), while none of the 134L4 clones showed recombination. Clone 13 was chosen for injection and was grown up and purified using the Nucleobond kit. The DNA was run in a gel and quantified against the λ-HindIII marker, and checked for absence of genomic DNA or RNA, and selected for preparation of injection construct.

### Preparation of Injection Construct

[0249] The injection buffer for BAC transgenesis (10 mM tris, pH 7.5, 0.1 mM EDTA, 100 mM NaCl) was prepared and filtered using a 0.2 mm filter. The DNA was diluted into the injection buffer to a concentration of 2 ng/μl. The diluted DNA was then purified using drop dialysis using nitrocellulose microdialysis membranes (Millipore, Inc.), and the purified DNA was diluted in equal volume of 2× polyamine solution (1/500 dilution of 30 mM Spermine tetrahydrochloride and 70 mM Spermidine trihydrochloride (Sigma Laboratories, Inc.)). A final concentration of 0.25 ng/μl diluted only in injection buffer was used for injection. The nucleotide sequence of the Drd4_ftTA injection construct is set forth as SEQ ID NO: 23.

### Example 5

### Expression in Subsets of Inhibitory Interneurons

[0250] Inhibitory interneurons are well-suited for a subtractive approach, not only because of their clear clinical relevance (for example, epilepsy and hypnotic drugs) and the central role they play in neural circuits, but also because they have been extensively characterized cytologically, leading to a classification of interneurons based upon which calcium binding proteins and neuropeptides they express, as well as their cytoarchitecture. This extensive molecular characterization simplifies selection of various combinations of promoters and facilitates production of subtractive transgenic animals that express in particular subsets of inhibitory interneurons. For example, while all inhibitory interneurons in the CNS are GABAergic, around half of them also express the Ca++ binding protein parvalbumin (parv), while the others express other calcium binding proteins such as calbindin or calretinin. Of these, some of them express neuropeptide Y (NPY), others express somatostatin (SMT), yet others express cholecystokinin (CCK), and others express vasoactive intestinal peptide (VIP). However, they all express only one calcium binding protein and one, or sometimes two, neuropeptides.

[0251] The neuropeptides and calcium binding proteins are expressed in other cells as well, limiting the utility of a direct approach. Therefore, the modularity and flexibility of the subtractive approach offers benefits over direct transgenic procedures for the manipulation of inhibitory interneurons. In addition, the subtractive transgenic approach can be combined with complementary approaches (such as the dual-recombinase approach described by Awatramani et al., Nature Genet. 35(1):70-75, 2003).

[0252] For example, a Cre recombinase line under the control of the GAD 65 promoter expresses Cre in most, if not all, inhibitory interneurons. Flanking it with FRT sites enables its use in the intersectional approach described by Awatramani et al. (Nat. Genet. 35(1):70-75), which describes a dual recombinase-responsive indicator allele that marks cells and their descendant lineages only if they have expressed both Cre and Flp, creating an “intersectional” strategy that labels cells. The dual-recombinase approach is complementary to and can be used in conjunction with the subtractive transgenic methods disclosed herein. Making lines with the various neuropeptide and Ca²⁺ binding protein promoters driving the expression of different recombinases and inducible transactivators with recombinase sites enables the complete molecular dissection of all subclasses of interneuron. Furthermore, the resulting subtracted lines can be mated to any tetO (or any other inducible promoter) lines expressing a wide variety of transgenes without requiring the generation of novel lines. Essentially any promoter that expresses in a subset of inhibitory motorneurons can be used to drive expression of an fSTOP-tTA transgene. For example, in one combination a GAD-65_FRT-Cre-FRT line is crossed with a SMT_fSTOP_tTA line, which would specify tTA expression (and thereby transgene expression) only in SMT+ interneurons. Further specificity can be obtained by mating this line to a line expressing flp recombinase by the calbindin promoter, further restricting transgene expression to SMT+/CBP+ positive interneurons.

### Calbindin Promoter Constructs for Interneuron Studies

[0253] The calbindin promoter was inserted into pBSIIKS+ from a BAC as follows. BAC RP23 12N24 and pBSIIKS+ were digested with SacII and EcoRV. A 7.3 kb portion of the calbindin promoter directly upstream of the translation start was liberated from the BAC. The pBS_CALB construct was then used to clone the Calbindin promoter into three cassettes.

[0254] The calbindin promoter was cut out of pBS_CALB with BssHII and EcoRV and the 7.3 kb band was gel purified (Qiagen) for insertion into both the tTA and the fSTOPtTA cassette plasmids. Both cassettes were cut with KpnI, blunted with Klenow and cut a second time with AscI. Colonies were screened by PCR for the calbindin A box and positive colonies were confirmed by restriction enzyme analysis. The final injection construct was liberated with BssSI/NotI and gel purified with GeneClean.

[0255] To clone the calbindin promoter into the Cre (no GFP) cassette plasmid, pBS_CALB was cut with EcoRV and SacII and the 7.3 kb band was gel purified (GeneClean). Cre was cut with Ecl136II and SacII. Colonies were screened by PCR for the calbindin A box and positive colonies were confirmed by restriction enzyme analysis. The final injection construct was liberated with BssSI/DraIII and gel purified with GeneClean.

[0256] The nucleotide sequences for the calbindin injection constructs are set forth as SEQ ID NO: 24 (pBS_CALB_tTA) and SEQ ID NO: 25 (pBS_CALB_fSTOPtTA). Maps of the calbindin constructs are shown in FIG. 12 and FIG. 13.

### CCK Promoter Constructs for Interneuron Studies

[0257] The cholecystokinin (CCK) promoter was cloned by PCR using BAC RP23-234117 as a template. PCR was performed by cycling with temperature gradient annealing (95° C. for 2 minutes; 94° C. for 30 minutes; 48-62° C. for 30 minutes; 72° C. for 6 minutes; repeat the previous steps 27×; 72° C. for 7 minutes; and store at 10° C.). Table 3 below provides the sequences for the primers used to amplify segment A (just 5′ of the ATG; 2089 bp), segment B (middle segment; 5678 bp) and segment C (5′-most segment; 2488 bp). Herculase was used to amplify fragments B and C and Pfu Turbo was used to amplify fragment A.

TABLE 3
Primers for CCK promoter cloning

| | | SEQ ID |
|---|---|---|
| Segment | Primer Sequence | NO: |
| A | AATAGGCCGGCCTCAGCGTGCTCCAGCC | 14 |
| A | CCTTTCTCCATTCACCCTAGCTTG | 15 |
| B | CCTGACCTCCTTAACCACCAGGC | 16 |
| B | CCTTGCTGCTAGCTTGTAACTTGG | 17 |
| C | AAATGGCGCGCCATTGGTGAAGGAAGACACTGAGC | 18 |
| C | AAATGGCGCGCCATTGGTGAAGGAAGACACTGAGC | 19 |

[0258] The oligonucleotide sequences used for modification of the multiple cloning site of pBS KS+ were 5′-aattcggcgcgccaaaacctgcaggagctagcaaaaggccggcca-3′ (SEQ ID NO: 20) and 5′-agcttggccggccttttgctagctcctgcaggttttggcgcgccg-3′ (SEQ ID NO: 21). Fragments were cloned into the modified pBS (pCCK) with the following restriction enzymes: Fse1 and Nhe1 (fragment A); Sbf1 and Nhe1 (fragment B); and Asc1 and Sbf1 (fragment C). The CCK promoter was subcloned from the assembled pCCK CBA construct into the lox-STOP-lox tTA cassette as well as the lox-tTA-lox cassette containing plasmids by utilizing the Fse1 and Asc1 sites of those plasmids to introduce the CCK promoter upstream of the tTA genes. The injection constructs were excised from the promoter/cassette plasmid by digestion with Asc1 and Spe1.

[0259] The nucleotide sequences of the CCK injection constructs are set forth as SEQ ID NO: 26 (pBS_CCK_ftTA) and SEQ ID NO: 27 (pBS_CCK_fSTOPtTA). Maps of the CCK constructs are shown in FIG. 14 and FIG. 15.

### Example 6

### Broader Application of Subtractive Transgenics

[0260] While the subtractive technique is primarily described herein with respect to the nervous system, it is readily applicable to any other functional and/or structural system in the body. For example, the methods disclosed herein can be used to increase anatomical control of transgenes within the immune system. The cells of the immune system are intrinsically suitable for a subtractive approach. Although lymphocytes are cytologically similar, they have long been characterized immunologically by the antigens they express on their cell surface, the CD (Cluster of Differentiation) antigens. The type of lymphocyte (and its maturity) correlates with the set of CD antigens on its membrane. As thymocytes mature, they begin to express various antigens that specify cell type (for example, CD3 and CD4 or CD8 for T lymphocytes), with more and more specific sets of antigens corresponding to more and more specific subsets of lymphocytes. The number of known CD antigens is approaching 300, but while in the vast majority of cases the genes encoding the antigens have been cloned, there have been very few transgenic lines made with their promoters, even though specifying transgene expression to functional subsets of lymphocytes would be of great general interest. This is mostly due to the fact that individual CD antigen promoters express in several cell types; it is the set of CD antigens that specify subtypes. Thus, a transgenic line made with a single promoter typically does not approach the necessary anatomical specificity.

[0261] For example, while all T lymphocytes express the CD5 antigen, only a small subset of B cells does. This CD5⁺ subset of B cells, sometimes called B1 cells, is involved with a more general defense against bacterial polysaccharides than the specific antibody response requiring helper T cells. Using a subtractive transgenic approach, it is possible to cleanly specify transgene expression exclusively to this subset of B cells by removing T cell expression. For instance, Cre recombinase can be expressed using the T-cell specific CD3 promoter and mice expressing this construct can be crossed with an ftTA line under the control of the CD5 promoter. Progeny expressing both transgenes are capable of expressing a transgene only in B1 lymphocytes.

### Example 7

### Subtractive Transgenics Using Viral Vectors

[0262] The subtractive transgenics strategy can also be adapted for use in animals (without the need for generating transgenic animals), including humans, by introducing the system components via viral vectors. A variety of viral vectors suitable for the methods described herein are well known in the art, including, but not limited to retroviruses, lentiviruses, adenoviruses, adeno-associated viruses and herpesviruses. For example, disease-specific biomarker information obtained using genetic or immunological methods can be used to develop disease-specific subtractive sets of viral vectors that result in regulated expression of a particular transgene (for example, a transgene encoding a marker protein, a therapeutic protein, a wild-type protein, a toxin or an effector protein, such as an apoptosis-inducing protein) only in target cells (such as diseased cells, including tumor cells, infected cells or cells comprising genetic mutations).

[0263] To accomplish subtractive transgenics in animals, three recombinant viral vectors are used: a transactivator virus (encoding a transactivator such as tTA, or a transcription factor) comprising recombinase recognition sites; a virus encoding the appropriate recombinase; and a virus expressing the desired effector transgene, wherein expression of the transgene is regulated by the appropriate responsive element (for example, tetO) or transcription factor binding site.

[0264] This system can be used to deliver any number of different types of transgenes. The transgene can encode a marker protein, such as green fluorescent protein. The transgene can also be a therapeutic transgene. For example, in the case of a disease caused by expression of a mutated protein, a therapeutic transgene can encode a wild-type version of the protein to prevent, treat or ameliorate the disease. Alternatively, the transgene can encode a toxin or other silencer if cell death of the targeted cells (such as a tumor cell) is desired.

[0265] The subtractive transgenics system can also be used to specifically allow the production of lytic virus in a particular subset of cells (for example, tumor cells). In this case, the viral vector encoding the transgene encodes the viral genes necessary for packaging of an infectious virus, essentially serving as a regulated helper virus. The lytic virus would not only be able to destroy the target cell, but would inoculate other cells or tissue, eliminating the need to re-administer this viral vector. The virus is replication-competent only in the target cell and only in the presence or absence of the regulator (such as doxycycline), depending on the particular system used.

### Example 8

### Use of Subtractive Transgenics to Treat Acute Myelogenous Leukemia

[0266] The neoplastic stem cells that cause acute myelogenous leukemia (AML) have been well characterized by flow cytometric analysis (Jordan et al. Leukemia 14(10):1777-1784, 2000; Blair et al. Blood 89(9):3104-3112, 1997; Wozniak and Kopec-Szlezak, Cytometry B Clin. Cytom. 58(1):9-16, 2004). These leukemic stem cells are serologically unique, as evidenced by the expression of an antigen that hematopoietic stem cells usually do not express (CD123), and lack of expression of some antigens hematopoietic stem cells usually do express (CD90 and CD117). This pattern of expression (expressing some, but not other antigens) is particularly well suited to the subtractive transgenics approach.

[0267] To specifically target AML stem cells, one can for example, clone the promoter for CD123 and the promoter for CD90 and use the two different promoters with the transactivator vector and the recombinase vector. For example, to selectively express a transgene in AML stem cells, the goal is to express the transgene in CD123-expressing cells (CD123⁺) AND NOT in CD90-expressing cells (CD90⁺). To accomplish this, the recombinase vector comprises the CD90 promoter and the transactivator virus comprises the CD123 promoter. In addition, the transactivator is flanked by recombinase recognition sites. Since the recombinase is expressed in all CD90⁺ cells, in any CD90⁺/CD123⁺ cells, the recombinase will excise the transactivator, rendering it non-functional. However, in CD123⁺, CD90⁻ cells, the transactivator will be expressed. The third viral vector encodes the selected transgene, which is regulated by the appropriate responsive element. Thus, the transgene is expressed only in CD123⁺, CD90⁻ cells.

[0268] This disclosure provides methods for highly selective expression of a transgene in animals. The disclosure further provides non-human transgenic animals exhibiting highly selective expression of a transgene and methods of generating such animals. It will be apparent that the precise details of the methods described may be varied or modified without departing from the spirit of the described subject matter. We claim all such modifications and variations that fall within the scope and spirit of the claims below.

1. A transgenic non-human animal comprising:
(a) a first heterologous nucleic acid encoding a recombinase operably linked to a first selective promoter;
(b) a second heterologous nucleic acid encoding a transcription factor operably linked to a second selective promoter, wherein expression of the transcription factor is regulated by expression of the recombinase; and
(c) a third heterologous nucleic acid comprising a transgene under the transcriptional control of a response element specific for the transcription factor.

2. The transgenic non-human animal of claim 1, wherein the recombinase is expressed in a first population of cells and the transcription factor is expressed in a second population of cells, wherein the first and second populations of cells comprise at least one overlapping sub-population of cells and at least one non-overlapping sub-population of cells.

3. The transgenic non-human animal of claim 2, wherein the transgene is expressed only in the at least one overlapping sub-population of cells.

4. The transgenic non-human animal of claim 2, wherein the transgene is expressed only in the at least one non-overlapping sub-population of cells.

5. The transgenic non-human animal of claim 1, wherein expression of the transcription factor is disabled by expression of the recombinase.

6. The transgenic non-human animal of claim 5, wherein the second heterologous nucleic acid comprises recombinase recognition sites flanking the transcription factor, such that expression of the transcription factor is disabled by excision of the transcription factor by the recombinase.

7. The transgenic non-human animal of claim 1, wherein expression of the transcription factor is enabled by expression of the recombinase.

8. The transgenic non-human animal of claim 7, wherein the second heterologous nucleic acid comprises a transcriptional STOP signal preceding the transcription factor that prevents expression of the transcription factor, wherein the transcriptional STOP signal is flanked by recombinase recognition sites, such that expression of the transcription factor is enabled by excision of the transcriptional STOP signal by the recombinase.

9. The transgenic non-human animal of claim 1, wherein the recombinase is a Cre recombinase, a flp recombinase or a β-recombinase.

10. The transgenic non-human animal of claim 1, wherein the transcription factor is a tTA transcription factor or a fusion protein thereof.

11. The transgenic non-human animal of claim 1, wherein the response element is a tetO transcription response element.

12. The transgenic non-human animal of claim 1, wherein at least one of the first and second selective promoters comprises a tissue specific promoter.

13. The transgenic non-human animal of claim 1, wherein at least one of the first and second selective promoters comprises a temporally specific promoter.

14. The transgenic non-human animal of claim 1, wherein at least one of the first and second selective promoters comprises an inducible promoter.

15. The transgenic non-human animal of claim 1, wherein at least one of the first and second selective promoters comprises a promoter that is selective for neural cells.

16. An isolated transgenic cell from the transgenic non-human animal of claim 1.

17. A method of producing a non-human animal that expresses a transgene in a selected population of cells, the method comprising:
identifying at least one progeny of a cross between
(a) a first transgenic non-human animal comprising first heterologous nucleic acid encoding a recombinase operably linked to a first selective promoter; and
(b) a second transgenic non-human animal comprising a second heterologous nucleic acid comprising a polynucleotide sequence that encodes a transcription factor operably linked to a second selective promoter, wherein the polynucleotide sequence is
(i) flanked by recombinase recognition sites; or
(ii) preceded by a transcription STOP signal flanked by recombinase recognition sites,
wherein the at least one identified progeny comprises the first and second heterologous nucleic acids and wherein the at least one progeny further comprises a transgene under the transcription regulatory control of a response element specific for the transcription factor.

18. The method of claim 17, wherein the recombinase is expressed in a first population of cells and the transcription factor is expressed in a second population of cells, the first and second populations of cells comprising at least one overlapping sub-population of cells.

19. The method of claim 17, wherein expression of the transcription factor is dependent on expression of the recombinase.

20. The method of claim 19, wherein expression of the transcription factor is enabled by expression of the recombinase.

21. The method of claim 19, wherein the expression of the transcription factor is disabled by expression of the recombinase.

22. The method of claim 17, wherein at least one of the first and second selective promoters comprises a tissue specific promoter.

23. The method of claim 17, wherein at least one of the first and second selective promoters comprises a temporally specific promoter.

24. The method of claim 17, wherein at least one of the first and second selective promoters comprises an inducible promoter.

25. The method of claim 17, wherein at least one of the first and second selective promoters comprises a promoter that is selective for neural cells.

26. A method for selective expression of a transgene in a population of cells in an animal, comprising administering to the animal:
a. a first viral vector comprising a nucleic acid encoding a recombinase operably linked to a nucleic acid encoding a first selective promoter;
b. a second viral vector comprising a nucleic acid encoding a transcription factor operably linked to a nucleic acid encoding a second selective promoter, wherein expression of the transcription factor is regulated by expression of the recombinase; and
c. a third viral vector comprising a transgene under the transcriptional control of a response element specific for the transcription factor.

27. The method of claim 26 wherein the first, second and third viral vectors are independently selected from the group consisting of adenovirus vectors, adeno-associated virus vectors, lentivirus vectors, retrovirus vectors and herpesvirus vectors.

28. The method of claim 26 wherein the transgene is a therapeutic molecule, a toxin or a maker protein.

29. The method of claim 28 wherein the therapeutic molecule is a wild-type gene or a pro-apoptotic molecule.

30. The method of claim 26 wherein the animal is a non-human animal.

31. The method of claim 26 wherein the animal is a human.

32. A kit comprising:
a. a first viral vector comprising a nucleic acid encoding a recombinase operably linked to a nucleic acid encoding a first selective promoter;
b. a second viral vector comprising a nucleic acid encoding a transcription factor operably linked to a nucleic acid encoding a second selective promoter; and
c. a third viral vector comprising a transgene under the transcriptional control of a response element specific for the transcription factor.

33. The kit of claim 32, wherein the nucleic acid encoding the transcription factor is flanked by recognition sites for the recombinase.

34. The kit of claim 32, wherein the second viral vector further comprises a transcription STOP signal flanked by recognition sites for the recombinase.

35. A kit comprising:
a. a first injection construct encoding a recombinase operably linked to a first selective promoter;
b. a second injection construct encoding a transcription factor operably linked to a second selective promoter; and
c. a third injection construct comprising a transgene under the transcriptional control of a response element specific for the transcription factor.

36. The kit of claim 35, wherein the transcription factor is flanked by recognition sites for the recombinase.

37. The kit of claim 35, wherein the second injection construct further comprises a transcription STOP signal flanked by recognition sites for the recombinase.

The application's sequence listing, which the Patent Office published only in electronic form, follows.

SEQUENCE LISTING (27 sequences)

SEQ ID NO: 1 - DNA, 48 bp, Artificial Sequence
  Synthetic Oligonucleotide Primer
cagctagcagggcgcgccgcactgactgatggagacttgggaagagag

SEQ ID NO: 2 - DNA, 44 bp, Artificial Sequence
  Synthetic Oligonucleotide Primer
gaattcggccggcctgccactgctgaacccgctccgggaggcgc

SEQ ID NO: 3 - DNA, 84 bp, Artificial Sequence
  Synthetic Oligonucleotide
cacggcgcgcctaggccggccataacttcgtatagcatacattatacgaagttatgtttaaacaccctgcaggaggggcccaca

SEQ ID NO: 4 - DNA, 92 bp, Artificial Sequence
  Synthetic Oligonucleotide
agcttgtgggcccctcctgcagggtgtttaaacataacttcgtataatgtatgctatacgaagttatggccggcctaggcgcgccgtggtac

SEQ ID NO: 5 - DNA, 86 bp, Artificial Sequence
  Synthetic Oligonucleotide
atcagactagtacgcgatcgctaataacttcgtatagcatacattatacgaagttatatttaaatacctcgagaggcggccgcatg

SEQ ID NO: 6 - DNA, 90 bp, Artificial Sequence
  Synthetic Oligonucleotide
aattcatgcggccgcctctcgacgtatttaaatataacttcgtataatgtatgctatacgaagttattagcgatcgcgtactagtctgat

SEQ ID NO: 7 - DNA, 20 bp, Artificial Sequence
  Synthetic Oligonucleotide Primer
aattaaccctcactaaaggg

SEQ ID NO: 8 - DNA, 23 bp, Artificial Sequence
  Synthetic Oligonucleotide Primer
gtaatacgactcactatagggcg

SEQ ID NO: 9 - DNA, 29 bp, Artificial Sequence
  Synthetic Oligonucleotide Primer
cgaaaacgtggtgggtagcgaaacccgcg

SEQ ID NO: 10 - DNA, 23 bp, Artificial Sequence
  Synthetic Oligonucleotide Primer
cgccctcgccggacacgctgaac

SEQ ID NO: 11 - DNA, 20 bp, Artificial Sequence
  Synthetic Oligonucleotide Primer
gactgggccttggaggtgcc

SEQ ID NO: 12 - DNA, 20 bp, Artificial Sequence
  Synthetic Oligonucleotide Primer
cagccaggctcacgatgaag

SEQ ID NO: 13 - DNA, 25 bp, Artificial Sequence
  Synthetic Oligonucleotide Primer
cacctagcttctgggcgagtttacg

SEQ ID NO: 14 - DNA, 28 bp, Artificial Sequence
  Synthetic Oligonucleotide Primer
aataggccggcctcagcgtgctccagcc

SEQ ID NO: 15 - DNA, 24 bp, Artificial Sequence
  Synthetic Oligonucleotide Primer
cctttctccattcaccctagcttg

SEQ ID NO: 16 - DNA, 23 bp, Artificial Sequence
  Synthetic Oligonucleotide Primer
cctgacctccttaaccaccaggc

SEQ ID NO: 17 - DNA, 24 bp, Artificial Sequence
  Synthetic Oligonucleotide Primer
ccttgctgctagcttgtaacttgg

SEQ ID NO: 18 - DNA, 35 bp, Artificial Sequence
  Synthetic Oligonucleotide Primer
aaatggcgcgccattggtgaaggaagacactgagc

SEQ ID NO: 19 - DNA, 35 bp, Artificial Sequence; identical to SEQ ID NO: 18
  Synthetic Oligonucleotide Primer

SEQ ID NO: 20 - DNA, 45 bp, Artificial Sequence
  Synthetic Oligonucleotide
aattcggcgcgccaaaacctgcaggagctagcaaaaggccggcca

SEQ ID NO: 21 - DNA, 45 bp, Artificial Sequence
  Synthetic Oligonucleotide
agcttggccggccttttgctagctcctgcaggttttggcgcgccg

SEQ ID NO: 22 - DNA, 235210 bp, Artificial Sequence
  Synthetic Bacterial Artificial Chromosome (ChAT_ftTA)
  misc_feature (12134)..(12233): n is a, c, g, or t
  misc_feature (18163)..(18969): n is a, c, g, or t
  misc_feature (19699)..(19798): n is a, c, g, or t
  misc_feature (38250)..(38349): n is a, c, g, or t
  misc_feature (54459)..(54558): n is a, c, g, or t
  misc_feature (59041)..(59140): n is a, c, g, or t
  misc_feature (77999)..(78000): n is a, c, g, or t
  misc_feature (78995)..(79094): n is a, c, g, or t
  misc_feature (90064)..(90278): n is a, c, g, or t
  misc_feature (94143)..(94681): n is a, c, g, or t
  misc_feature (96773)..(96872): n is a, c, g, or t
  misc_feature (98860)..(99078): n is a, c, g, or t
  misc_feature (120309)..(120408): n is a, c, g, or t
  misc_feature (130877)..(130976): n is a, c, g, or t
  misc_feature (132008)..(132107): n is a, c, g, or t
  misc_feature (142233)..(142332): n is a, c, g, or t
  misc_feature (145307)..(148239): n is a, c, g, or t
  misc_feature (161692)..(161791): n is a, c, g, or t
  misc_feature (164160)..(164259): n is a, c, g, or t
  misc_feature (166914)..(168030): n is a, c, g, or t
  misc_feature (169077)..(169176): n is a, c, g, or t
  misc_feature (170996)..(171225): n is a, c, g, or t
  misc_feature (183767)..(183881): n is a, c, g, or t
  misc_feature (186764)..(187039): n is a, c, g, or t
  misc_feature (213452)..(213592): n is a, c, g, or t
  misc_feature (219624)..(219723): n is a, c, g, or t
  misc_feature (227822)..(227921): n is a, c, g, or t
  misc_feature (230567)..(231541): n is a, c, g, or t
  misc_feature (232691)..(232790): n is a, c, g, or t
acttaactgagcaacgtctctgagggaagcagtgctgagctgcatgtccttgccactgtcatgaaatattctatttcccatgacacagcagaggatctgaggcacatttaccatggagcacaaggagcacagcagcatatctgagctgttgagcagacagggccctgtgccaggatggacctcctccagagtctcctccacacctcatcttccttcactgcttccttcacactgaggttctacatctgttcatgcccactaacaagcagctaccgacgccgacgccttaccagaaagagcacccaccacccaggtagcaagcgccaggcacaggtacagctggcttgaccagcatgctgggaaaggattacttttctgtcctagcatccagccttaactaggcaatcggatctgtgtcttgccaggacacagataattcaaagcacggggcatattatcagtgccagaaagtctatttagcttggagatgtctggagcatgagcatcatgttaaaaaagccagtcctagaggatacctgtgtccctccagcaagagcaagagcccacaaacatcagcttctaagcatagctcctgctcaagactactcagagatttgacctatagcggatcccaggtcccgcctgaggatcggataagagatgcacaggaagggaacatccaagactgagctgagagcttgagcctaatcagaatggggagggtttcaactatggctgtccagttctagagcaggtaagccagaaccttagacaattaaaaacaatatttcctacactggaaactttgggtttattctgatgattcaagtcatcctgtggtcagcaaccctgaagttcttgttcagtccaagaactcctactacaacgccatctgtctacaaacaacagcatacataacagaattccatgaatgacaaatttcaaacattaatgtttctcaatccttagcattttattttcttttaacatccccccatcgaaagagcaccaaaggagatgtaatataaacatttcaatgtgtatatctgccgcttaacagccttaataactagctataaaattttaagagctatcatattttggtggcaattaagaattattggtatttctgaaattcatttgagattttactgtaactttagcaaaaaatggattatggtatggctttggaaataataaattgttttacaatcttaacattattaaaaaaacttattgccatgaaattaaactgtacccatatttaaaattcaatcaaaataaattggtatgtttaaaatacatttaatattgactcagtttaatgagaagactatatattgctccatttataatcaatatgctatgattaacttttttattaatttcctacagtaaagactgacagtattcactgtttaagagtattgagcagtattcctcaaacagtatagttataggtgtgcacactgacctttgccgtgatggtaaatgagcagcataggcccctccctctctatgcactaccacaggagctactacaatggcagtggcactaggccttgagttacctttaagaaactctgaataagttatgcaatgtacttggagcttggactagggttacagcagctctgaactaaacaaaatcaataggcaagctttcccaggaaggcacatggaactcttctagaaacactatcaactagctttcccctcaccgagaaataaaagcactgttgaggactagccaaagccatcccaatagtaatatttctctggtgccctggttctttttctcctctgacctctgtagaaaccctgtgcctgtggtatgtggagtgctctcctatctcagagaacccacccggcgatgctgactgtaaccccacagacgctcatctccccctcagctcataccaagtgctgacaaagtcctaatggtaaaagccaacccagcctcagcactagcagatggcgggcggcaaggagatgtgtgctgtgcgcacagtgtaccctcggcattacagcagcctgtaattctgtagacaactattttctcaaagtcaagggaggaggtatttggcaaagaacatcttctctcatatgctaaaacacgcgtttcagcttttttctaaaggaaatttctctaaagtgaatatcctacctcacaaggaaaaaacccaatgtggaagacacttcccttcctgacgcttgctgcagggcgacaactctgagtaccagacacgcagctagtgtcagccctctcagctctggcccagccttcccctagctcctcagtccagacttgcctctcaattagaataaagactgaaacctttggggccagctccactaaggactccatgtccaggttcttgtgggctaaggcagcaagtccagcgtctcacagctaggggacctagggatctaaaatgctaagatccccagggcggcctcccgcaagcagcagaaactcctcctaggatgcccccaccccccccctacccccgtacacactaaccttaaccgctgcttataataatcctcatctccatcgtcttggcgcctggctacctttcggcctcctcctcttccttccatagcttcatcttcctcctcagaacttggaaagaagtcatcgtcgatctcctgaactgggactttcttctggtatttctgcctcttccgaagaggcttcagctcatagctaacgtcatcagaagacaggctggctaccccttcctcctcctctttgttcttcctcctcctcccccatcggtgggagaggacccagactcctcaccctcagtgtctccctcggcctctggcctcacctcaggctccaaaggtttcttcccgctcggcaatcccactttgccctggaactgcagcgccctcctctggagtttcctgctgtgcttcttcaggcgcttgtctgtctgagagagcacttggcttctctggtctgccttggtttcaattgctgctcggcttgactcggatatgactatagcttttttagctgttcttttagtagcagcttgtttcttcctttcaaacgaaagttgtgcttgctctgccaaatatttttcaaagcctgatgcttcattcagcattatttttctgggctttttctcctgtttctgaggggctggggtaccaaacggtgtcatctggccagtgcggataagctcctcccaggcggtctcctgggcaggcatgagcatactgccaagacatgatggccctggctctgaaagggaagcaacaatgaagactcgagtaaaactctcaaagagcacaagggaaagcaatcactctctcacaggtggtaagaatttccaggaactcatgaaacaaatcagtagtgactgaagcagagcaaagtttacaacccatgtgtactatattctcagtaacttttccccaatatgtgacactgtataatgtggtatacaaacactgtgcagctacttttaaaggatgaaattctacacctgcaactgcaccgaactaaagattatgtgaagagaaacaagccaggcttagaaagacaagtgctgtgtgctctccctcacaggtgggatttagacaagctgatcttcacaatgctgagagtaggatgggactactgagagctgagaagaacatcagggaggaaagagaaggctgatccgtggtaccaagtcacagttaacagaaggggacgtctgtggtaccattccaaagaaggaggagtatacatagtagtgacagattgtgttgtttcaatagctggaataaggttttatgttttacaccactaaagaaacgataaatgtttgagaagatggatatgtttaacccaatttacacactacagaatatatatgcgttgaaatatcacatgataccccataagtacacaaaatgtttacctactatatattcatttgttcttttgtctaactttgaatgtgaataaaaatgtatcacattatagccatactttctgtacaaaggcaggcttatctacacattattggttataaacagacaatctatgtttgatcatcagttaagaagtaagccatgacaagtgatcccccacatcctatgtcattactttgccagacattcagatggaccttagttcatctaaggagtcagcatgcctatctaaaaagacagaaagtactgcacttcctgcatggtcacaacccgtcactagtatctgactgcttaaccttttggcattgctacaagacactgtcatctaatggggctgcattcatagctatccggggatacatgtgcccctcaggtcacagctggacatgcctggttcacttcagaatgggaaaactaaattcctcagctggaacgcaatgccagcacaaggaacaacaaagacagcgagtgagttcttctcaatgcggacaggtccatcggagagctgggaagagggtttgctctaaaaacacaaggacctaccaaagtttaaattctcagttcctggaaagccaggaatgaccacagtgctgtaaccccaacattagagaagaggcaagcagatcccccaggctcactggctagccagcctagccgacaacaagcccaaggttcagtgagaaaccctgttctcaagaaatgaggcacagaatggcagaggaaaattcctcatatcctcttctggtctctgcatgcacacatgcgatgcattcatacatgcatacacatgcatacacacacacacacacacactggatgataccatgctaggggtgtgatgtgaataacttgaaaagctatactaaatatgaagatatgtcaaatatagtcatccagaaatacctctccccctaactgaagctgacctccagcaaaatactttatcatgtaatcagaaacaaaagacctaccaggccaatgtcaccagtcagttttccactaaccttgcattgaaataaaatatacatcagagtatataaatcataagccccaatgactagtcagaaaaaaagcttcaagaatctatagttctacttcagcatccagatcaagtaatagaaatcaagaactagtgttctcagcacaccctctctgccaccttctcagcctccagcctcccctgagacactgacaggcctgactctaagaatgactcatgcctggctctgtgttcctgtctgcctgctatgcctggtattcagcatgaaatccatactgatttaatgttcaaatggattgaaattcattaactgactgttactaatatcctgtggttataccgttttctctttctactattaacatagtttgggtggtttctaggcttgggctactatgaatactctggtatatatcatttggtaataacagatatctgattctttagtatgctaaggtttagcagacactgctgaaaagatttgagaagtggcactagcttaagtttcagtagtgtttaagaattcaaactagcccacattcttgccattccatgacttcaatgatttccagtgaaaacagaaggcctttcaaatccgtgccttatggacaactgctgttgtgtccaaaattttgttcttagtctatgtcttaacctttcttctagttttttactgcatcataaattcaagtcctttgcatgttctactactatcttctcccaccttctctgcaacctcccttctccagttctgaacactctcctgacaggcagaagctcctggctgtttctcaaatccatttagctgttaaattgctctcttcctgtgcacactttacacttgtggtcttgcttcagtccttgcctcgcctgctccaggatcatgatagtgtctccctgtgttatgttctcagagcctttttatcattaacattcagatctataaactgcctggagtatatttttggatgtaatatatgtaatggattgagattcctttattagtcttctggtcaaaagattgctcatcacagccctgctcaggatcttcatcaccatcaagtgaataaacgctggtggacacgtttccggggccttctatcccatccatctgcctggctgtggatacaacactgacttagtcactacagctttatactagacattggcattctgttttcttttcttagataaggagtggtaagacagggtcttactctgtaggctataatggcctcatattcacagcaatcctgctgattcagtctcccaagagttgggattgcggattttaacactagcttgctaataacctctaccttcagcctatgtcttatacatgccatttgtcatcttttttaaaaggctcaaatttatattggggtagcattgaaactacagctggctaaaaatgtcatctttataatacggaatcacccaacatcaaccacagtatattgccacatttgcttagacttttctttgtcaataacattttgcagtttttagatatataaaacatttcagaactgctttttttcctaagatttatttctaggtctttggattaaaactgatacttatattaaattttatcttttattcttcctagcatacaagaataactaatttttatgcactatgtattcaatgctattattaaaagtcttgtggtcattccacagcaattcttctgtatcttctacaaaagctatcatatagctgtgaataatgatgaattccttctttcccactttactcaatgggcttctttcctcttctcagacaggaccatgtgtggctgaatagagaagggaagcaagtgtgcctgctgccctgcaggtcacactggctaaggcagatctccaatctgtcctcatcccagctacatgcaggaagaggctgctgctaagccgcataaccaccatgtggaagcagtgcagacatgtccccagggaagcatgtgggcagcacacccaacatctgctacatggcttcagatgggctgaaagaggtccacccagcagtacagagccaggctccccaaagcctggctactggcattcagctatacagcctctgcagacagggcccagtctccagtaatggctagtggtcagacgggaaagtatcctggggaccaagagctcagaaaaaaaggggctatggatttgtaaggcgtcagatctcaggtagctgcaaaacccatgggaaatggaggagacagacaaggagaggaagcaacacgaacactcaacatgtcctaagcagcatcagcatttaagatactcctggataagttaccaacaataacaaaccagaaccaaccagagggcagaaaagaagccaggagacaggagtccgacactctctcaagcatcatcaggctgaacctggcaaaggtgaagaggcctcaggacttgcagaggtatctatgaacgctgcctcagcagaactaaagaactcaggcttcagacagacagggaagatccccttaccatgagaaatctggtacccaagtggcaggaaccagggcaggcctgatggaacatatgagactgaactttagaagcaaatctaaagccaggagtgaggatgtacacctgacacaggaggacaattttgagactagcctgaggtacagagtgagctctcactttacgtgatgggaggaagggggagcacattttttttctccattgttacattcttcatacaaatcctcttgtctatgtgaaaaaaagttccaggagttagcaaaggatgtttgcttgatcaaccaaactctactaatctttaacctattaatctttaacctatgttttaagcagaaactggccaagtaacaaccaacagtgtgtaaatacagacacacagaaaaaaatacttagtttgggggtttatatatttccccaagaggttttccaaagcatggttgtcctgaagagaacttgaaatggactcctggccacaacctaacctgaatctagcctttccttacggaggagggcttggaaagcctgtcatgctccttaaagactggacagcaagagcaagcctacagatgctgactgaggagctaagactacaaaatgaacccaatcaagatcctagttctctttatcaagttaatgtatatgaatgtgcaaatctctgttttattaagcctaacacaagtctgtgccagtaaccaccagaaagaaccaggttaacattttattttagtctctaaaaagcatgtgtgccttaagagctctgattccgcaggaaaataagatttccccagacccatctgacacaggcaaagcaacacattagtctcaaaactcaaaaaagtctcacaagacacctcccctgaatacaggcaccaggcattgattaagagcatgccaagctgccccgacatcctcacctgcatcgtcctcctctaggctggcatgatccagttccacttggaccccagcccctccgagaatggcctggagacgtttctgttttgcagttatcttctttagctgttgttccttaagttgtaaaccccgaatacaagatatacaatacaatgatttattgttaaaacgaagactgcaccacacaatttaaaactttaatcaagagtaaacaaaaagcccacatggtaccatccctagtgagcaccagctgagcagttcccactttcctgcagcaggagtattccagcccagccagccagccagccacacccacaggcagccctctccctcggggcagaaccctgagctcacaggcactcacttgggaggtggatgttctctgagttccctctatacattctgcatacatcactgcactctgtttctgacctaggaaaccaaccagctacagcaggcggcagcccagagtggcatgaaataaaagtccaaaagggcaggcccctggagacctggccatgaacggcagcctttggagcactcgaccccatcaaagctttgaaagacactatgctaaggcttcttcccaggtacctcaggctcctctctctccctcgacattatgagaactcaggtatgtggccttccgaaagcttcaactatcttcatgcagaaaagagttcttgcctagtacacacaggccctgggtttgatctctagcatcaggtgagggacaaaggcaaacacaaacagtatgctaccatgacttgcaacttgttttctcaggcttcctgtatcctactcaaagcattttccctctgaaaatcctaaacacagaatataattagatcaggccatgacccagtcacctaacagctggttctctccaccttaaaattccagcccacaagaagcccaatgtccttcctgatttatgaaggctccatctgcactgaagtactgccagcttggacattgggttgctactgtagaaatgaagagctcagtgagataataaaggaaggctacactacagagtctacacactgccctcaagtggaactcacaggacaagtataccacaggctgcattcagtcagccgcaaacagagacacctgcgggcttggggccagaaccatcaacgctagttagtcatccccagctaccgccatcaattcccacacagtggttgctatacaaaagcccaaaaatgtttcagccttcacaaagctgtatataagtcctatttttttatataaatcttattcttaaaagcctcagaaaagcaatctcagaggcaatagtcccttcccacccctgagttctctgcctctatgcagccccatacagctgtcctgtgagtggtaatagctgtatctgcaggaaacgaggagaagacaattggtaagccagacccaagcaggatagctaagttcagacaaaatagacagagtgagagctctggcccgagcagaggctggaatggtagagttaatgctgacattccctgtccatgaaagagcacaaaaccacaagaactgcccctgagtatggatggatggatgtgtgcatccacatatatgtatggatgtgtccgtacatgtgggttatcaaaaatactgcatagcaaaacaaacagaaaggcaccccaaatttttctattgtggggctagagaggtagctcagaggttaagagcaattactactcttacagatgtcctgggttcagttcccaatacccacatggtggctgacaactatctgtaacatcagttgcaagggatctagtgccctcttctggcctctgtatgcaccaggaacacacatggtacacatactgacaaaacactcatacacttaaaataatcaatctttttaaaaaatatgtttctattatactgttattacccatagcatgtgtaccctctggaatccttcctaagcatttaaatggtccttaaatgtactgtggcgctcagtaggttacttagcatcaccttgttatacttctgtcgcttcacggaatctagtttcctgttgatgtctctgttgctggcagcttgagggctaagttgctctataattttattgatttgcctcagggatgttgtacatgacctgaaataagaatagttgtctgtttttctccatggtaacattttcttagcataaagtagagaaaatgctagaaacacatctatcttacttcttatgagcgaaaacatgaacaaaactgaagcagaatgcctcttagagccacaaagtcaccaacagtgttcctgtcttctcaggtggtttaaaccagcccatgaatatttgcaaactgactcatttctagaacaagcatttttttagtgtctatttattcaagacagttggataaggacagaactcagtccaagtttccttttatatacgaagaaactgatacacatcccaaagtttgaaaaagtcctaaaatgcttaattattctcttaactcacttatctatgtaaatattttccatccacagaactgcaaattcctctactgtaacattaaccttcatggtgtaaagagaaaagaataattgaaaattagttgctcctaaaatattacaaaaatgctgcttctaatttttaaaagagaaaatcaatctcatgacttgctatttatattctttgcagacttcagagtaacaatgcaagtcactagctacttaaggcagtattgtccttaaaacctgtacagaaagtggacacagttccgagagcaatcatagaaggtgggccactgcacagaacaagaaaggtttcaaaacacttaagcaaaagacgtgctactcaaggagtgtaaacaaataataacaacaataatcatgatttcaattaaaacaaaagaacttatcaaggaactgttaacagaaagaaatgttctttgagcatccatagaaacctagcaacagccccaccattgggtagtgcctctaactctgtgctcactcacctgcctccttctctagccatgcactggggtttcccgtttttccacccaggccagtccttagttgctcttgcttctatgtctgacctacctagacatcacccaggaggacgagtgggctccatgcttccctgcttccctgcccttggcctctccctgaggctggcctacaccttccccaccagaatatttcactcagcagagcccacatctctttcttctacaacacaaatgaagtcttcataagattgaatcttcctttaaagccaaaaacaggacacaagaaaaatgaagggcagggagtttattcccaatatttttataaattaaaaacattgtttgggaacagcaaactagaatctataggagagagaaaggggttgataggtcccaagcgttccctgggtctcaagtatgaagctcccagaattcacttcgaagagcatctgcatgtgctgccaggaaggccttgttcttcaagaccctaggcaaggttcaggggttgatctaagcctataggcaataactataggcaatgttattcctccagggagggactggaactcagaaggaaaatcgaggattgtcttaacctactatttcccaaatgagaggttctataaatctcagctttctactacctgaatttccctattacacttcaatgcaaactctgagaaacagaaggctcacactcacatgaggtcatccaggactgactgatactccttctccgcatcagcaagctgggccacacagctggcctcatgcatcgcactgtccacctgctgaagcacgccttgttcnnnnnnnnnnnnnnnnnnnnnnnnnnnnnnnnnnnnnnnnnnnnnnnnnnnnnnnnnnnnnnnnnnnnnnnnnnnnnnnnnnnnnnnnnnnnnnnnnnnnaggacagcctggtcatagacgtccacaccccaggcctgcagctccagggcctgagcactgggctcaactgcagggatctgatgccgatcaatgtgtagcagggtcggcccacgccttgtggctgccaacacacaagcttcagcagatgtggatggcccatactcacaggaagtagaggagaggcactccccggcctctgagaccccaccattctcctgcccaactggcatgtctttgtaagcattggcatgctgacttggtaaacagtcttgctcctgagggtgagtggagttgggaacttcctcgtggaacatcctctacaaactatctaaaaaaagaaagcattgataagccttttggttgttgatcagtatacagtgtcttaaatatgctaaatgcatgagtttctcaaagcagcgctaaccttctaataaaattaagtttctaaaaagaacaattgaggataaagaaaagctaaccaagatagacacagtgacaacaacaaaggtcctgagaaagacagtggcccaatcctaagtgacagcagcctcagaatgttctaaaacaggtaaactgacctggctgctgtcttgccagtcagcaccttcactgggctgtggcacagaagctttgtgtcagagcagcctagccaactgtgcagtgcatttatcagtaatgtgagaactacaggaatcacactagcaacttctaaactgagtccccatctagtgaatggatcatatcagaagcttgaagattaagggaaaaaccctcaaagatacatccatttcaaatgcagtcatcaaatctctaccctcaaggctcagggacccatgtggaagaggagggggaacaattgtatgggttagcatctgctgaaaggaagtaaggtttacaaagcagtccaaaataaaaaagggtagcctaggtgaccaagtcacaagtggattcagtcacaacaatgactctcaaaaaggaagcaaacaggaagctgaagtggaggtggctgagttcaagtcacaagtcacaatactgacacatcttgtggtcccaatgcaaatctgagtccaagggggaagggaagggctgggcaaatgtggacacagttctaagagcacgcaggcctggaggtcccagagaccatcactgaggagggtgatgataaaaagagaatattcctcactttagggtctttcttattatcttcagaggaaaagtcgccctccaatagaagggtggagttctggttcagagcctacctgtaagagctggaattaaaaatctacatacttaagagtttataggaacttctttttctatttttcatgtataaagggatttatttttaagttaaaatatattaatttaaccaaaattatcaataccattttagtcaaagataaatttacaaatgaaattttgaggaaactgatttttaagcagggtaaagtaaaaagaaatgaatgactagattagagaagaaaagcaggattccgtcaatctggacttgggcagctcgctggggatacctgtaaaagaaatttttcattggacatgtggcgcacactgtaatcccagcacttgagaggttgaagcagcactgtgagttacaggccagcctgagccacacagctataccgttggaaaacaagcaacaagaacaaaaaggggatgtggagggatggttgaatccagtagagcaacagacacaaaaactaaaaaccagactgtctgaggtcagcaggcagcaaggcaagggaggacacagggaggcaatctaccactttaaggaccttgactacataagggagaaagggtgatagataacccgaggttttgttggaaagtaaaagaggaaaaaaaaattaaaattaaaaagtgtgtgtgtgtgtgtgtgtgtacatacatggcaagaaaacaacataatgtccttcagagatgcttgaacagaaaactgtgcggcaaccaggaaaggtggagaaggcatagcactttcatctgcctctagctggagagtgacacctggtgcccacagatacaaaagggagttgacaaagaagataactccacaaggaagaagcctgggcctttccttggtcaaagttgggatgggggaggaatgtgagaagaatgagtctatccatgagaaatgaacactgcaggcgtgtgctttccaaaatgatggattggcaacactccagtgctgcccagttccctcctcttgtaaccagtaggccttggagaaaagtcattccttgggatggtcagagaagtggtagaacaaaggagtaagaactgaaaggggccaagaagagcagctgaagttaacagcctggagttcatggtgggaggggaaggagggcaaaaagctgtttagcttctagctatagccagaagagagcttgcatgtgtgggcgagagaatgcacatgggggttggggggagtataatgtaaagaaggatttgatcaaagcactaaagtttcagaggtgaactaaatcacacactgacaaaattactgactcaatcaaatgaggcatgaggcagttccccctagtcccctgggaggccaggcatttaaagaaaaaatggctttagtatagatatatacaagggcaactgtggtgatggccataaaaagaagttacataactcggcaattaagagagacctaagtaaaactgtgaaggtaaggtgtgaggtggcctctctgacaaagtgtcactctaaaagattaatgagatttgatcaaggtcaaaagcagagttagcatctcgaaatgagataatgaataaaggctggaactcagtgagaactttgtaaccaaaattcaagagctgattatagtattgctcgctgtgtaaatctttcagtcgttccagaaacatctaaaagttacaaagctaggaaaccagacttgtgacttgggttttctacggccacaaccaagctggattagggtctggagagttatctgtacataagtacggtgttgaagcgagaagggacaagttacacgggtccgggggcggggggtgggggggtatgctcttaaattatatttcactgaaatggctctcaaaaagtttaaggatgcgtgacaacagcaggacccaattaatgctcgtaaaagaccagttttggataacagagaaatagcagtgcagtgctaataggatgaagtcaggaggaaaaagacgagagggctcggaagagaaggacagcggtgaagatgacaccgcgaagggtaccgggttacagcacttacagctctgtccctcccactcaactttgcatcttacggaaggcgccgggtatgcaccaccctgactctccctctcaaggacaccatcatcgtcatccagacccaccagagccctgtaggccctgcacgccgggccccattcacaaacccagaagcaaatgcaaggggctggtccgcgcccccactgccccgtgccctccgctcaggtgagagccggcgccacacgtcacttccggtttcaggtgcgcctgccggaagatatccggcccacgggcgaagccgcggctcgctcggacgggctccgccgcagaaggctagacgcccacggcgcggggccacagcctcatggagagcccgaggcgcaagtactctcacccggccttctgtccggctgccgaacactcacccagaaccacgcggctgcccaaacgaattcttcgtcgctaccgccgcgacggagcgttgagacaaaccttagcgcatgcgccctaggcctgtgctaagcaccgcctctgggggcgggcaggaccaacggcgcctgcgccttgctgagccgtttgtaagcaagggtttgccacgtgcgttgaccaaagggagccgcgcgtggcctttgtcctgggctaggttggactgtgtggtcagtctgtagccatttgagcggcttgtatcattcttgacaaatgttatctagttttatgaattaaaagatattaataagttatttctccgtcaccaccggtgaaataagccaatttaaaccagattatactaaaggcaggtttattggaaggcggttgtctgtcgagttcactggccccaagggttgaagtcgccattgtgggggtgggggtcgtgtatgcgtagagagagaaggagagagcaaaatgcctggatttttttgggaggaacctctgagggaagggcagcccaggccctgggctgggaagttcagggttatggggcagggtatgccaggtagggactgagacatggtatgccaggtacggactgaaggatgctgggaaaacctggaggctttgatatgtaaaatacgcatctcagtcccttgtccctgggtctgaaaccaaactttctttcttttcttttttttttttttttaaatttggtttttcgagacagggtttctctgtatagccctggctgtcctggaactcactttgtagaccaggctagcctcgaactcagaaatcatttttagagaaagaaaagggagtctgccaatgagtgactagctaaaggtgctcaaatcctttgctttgacatcctcacctcaccgccttagtcatctggcacatcttaaaaccgaagaggaaaacgtacctttatgaccgctcaccaacaccaccccaagacctgggcagagcacctgagtgcatgtacaacatgcaggtctacaacagatggcttaactacattaagtcacttaatacttgttaactaatattaactatctaagccaagtagtaacattctttacccaaccaagaatcctggaggtggtctcgcttaggtgagaatttacaaagaaaaagcccagtttcccaagaggtagctgaattaaactgggaactaattagcccagaaatgccaagaatagagaaggtggaattgtcagggtccttggcacgaagtccagtgtaaaggcacaaaactttggggggcagtagtgagaggctcctcactgccatccccagcaacccgccagtttatgaagcagagtcaaaagatttcattaaagacattttaatcagggcttaagctcaaaggttaaggaaaggaggggctctgcgaagcaagtgaaacacacatatattcgtgcttctcagagagccacgactgtcatagcattagccaaataaatattacatctcaagagattgctaagaattctctgcacacaccacccctcctattatccttctcctagtaaatcagattataaggtaactctggagataccttgggtagaagtaaaaccaggcttgagctgaccaggtggccaccaaacctcaggacctgaatcctgtcttcaggacccacatggtagaaggagagaaccaactcccacaccttgtcctctgaactccaggcatgaacattatctctgttctccttctcctggtctactcctcaagcttataaagctaaattataaaacccctgcctgtgcctagagggatgggatcatttcccctggcagtggtctccgagcccgctcttccccatctctgctctcgcctatacctgtgtctttacccaggtgcccgtcaaggacttcgtttcctaactgtaccggggtattaacaacacagttggaaccactgctgtgcttgtgaagtttcttacataggtctgatggaagacctaactgtatcacctaacaaccctgcccaacatgaaaacccacagctgacccaggcatggtggctcgtgcctttagtgccagctcttgggaagcataggcagggaatcttagtccaaggccaagctgctctacagagcaagttccaaaatagtcagggctacacagagaaaccctggcttgaaaaatcaaaagaggaggaggaaagtagtttatggtaagaggatggctcctgtgcccacctgagtactacagacaccagtctctagaaccagaatgggnnnnnnnnnnnnnnnnnnnnnnnnnnnnnnnnnnnnnnnnnnnnnnnnnnnnnnnnnnnnnnnnnnnnnnnnnnnnnnnnnnnnnnnnnnnnnnnnnnnnnnnnnnnnnnnnnnnnnnnnnnnnnnnnnnnnnnnnnnnnnnnnnnnnnnnnnnnnnnnnnnnnnnnnnnnnnnnnnnnnnnnnnnnnnnnnnnnnnnnnnnnnnnnnnnnnnnnnnnnnnnnnnnnnnnnnnnnnnnnnnnnnnnnnnnnnnnnnnnnnnnnnnnnnnnnnnnnnnnnnnnnnnnnnnnnnnnnnnnnnnnnnnnnnnnnnnnnnnnnnnnnnnnnnnnnnnnnnnnnnnnnnnnnnnnnnnnnnnnnnnnnnnnnnnnnnnnnnnnnnnnnnnnnnnnnnnnnnnnnnnnnnnnnnnnnnnnnnnnnnnnnnnnnnnnnnnnnnnnnnnnnnnnnnnnnnnnnnnnnnnnnnnnnnnnnnnnnnnnnnnnnnnnnnnnnnnnnnnnnnnnnnnnnnnnnnnnnnnnnnnnnnnnnnnnnnnnnnnnnnnnnnnnnnnnnnnnnnnnnnnnnnnnnnnnnnnnnnnnnnnnnnnnnnnnnnnnnnnnnnnnnnnnnnnnnnnnnnnnnnnnnnnnnnnnnnnnnnnnnnnnnnnnnnnnnnnnnnnnnnnnnnnnnnnnnnnnnnnnnnnnnnnnnnnnnnnnnnnnnnnnnnnnnnnnnnnnnnnnnnnnnnnnnnnnnnnnnnnnnnnnnnnnnnnnnnnnnnnnnnnnnnnnnnnnnnnnnnnnnnnnnnnnnnnnnnnnnnnnnnnnnnnnnaaccagaatttggtctgtgctacctgtgtcttacaaaagccaatgagaagagacaggaaattcccttcaagtgctctactcggagattctcagctaaaagctaaaaatgtccttggtcctgtcagtagcttcatccttgtcagaggccaaatatgccacaattgtttaagccaaaatatttttgccagaagtcaggatgtaagaagggaggcctgggtttgtttgttgctttttttttttttttttttttccttatttctcttctccttaacctgcaccccttcctggaagctctatgcaacgctatgactgaaactataaacactcatttcttaaagaactttgaaactatatttctggattttcatgttgaagatgggttacatccggatctgctccaaaatctagagcattagatacattgtctcccaccttaaatctagagcattagatacattgtctcccaccttaaatctagagcattagatacattgtctcccaccttaaatctagagcattagatacattgtctcccaccttaaatctagagcattagatacattgtctcccaccttaaatctagagcattagatacattgtctcccaccttaaatctagagcattagatacattgtctcccaccttaaatctagagcattagatacattgtctcccaccttaaatctagagcattagatacattgtctcccaccttaaatctagagcattnnnnnnnnnnnnnnnnnnnnnnnnnnnnnnnnnnnnnnnnnnnnnnnnnnnnnnnnnnnnnnnnnnnnnnnnnnnnnnnnnnnnnnnnnnnnnnnnnnnntctcccaccttaaatctagagcattagatacattgtctcccaccttaaatctagagcattagatacattgtctcccaccttaaatctagagcattagatacattgtctcccaccttaaatctagagcattagatacattgtctcccaccttaaatctagagcattagatacattgtctcccaccttaaatctagagcattagatacattgtctcccaccttaaatctagagcattagatacattgtctcccaccttaaatctagagcattagatacattgtctcccaccttaaaagttcatccagacgggcccatcaatcacctggccaagaaacctggggtggcctgattcaccgtgatagaagatggccaactctccccttaatgagtatatggttagacttgagggaacccttctctccattcactcacagagctcccgccgtgtggcccacacacttccttgtcttttctcttttcctttgggatactggcaaagcccggccataatttccctgacatctgggctttgccattcattcccttgccccatctaagccatgtggtgaattgcggacttccagtacaaacaatatggctttctctctccctctttttcatctcccttctcacagtagtgactaggttagtagctttcctgccctgacgtttttctcttacactgccctcaaccttcctttggagtttgtttctggtttttgttcttgtttttgttttgggtttttcgagacagggtttctctgtatagccctggctgtcctggaactcactttgtagaccaggctggcctcgaactcagaaatccgactgcctctgcctcccgagtgctgggattaaaggcttgtgccaccacgcccggctttggagtctgtttcaaaattcttttattaacccccaaaaggggatctcagtgcccctagtgacatatcttattcatgtagtgatgtgtcacttcccactttgagccccaagtgagagaaaaaggaattgcaaagcttgcttaatcattcttggtaacacagccccagggggcttggtctgaagtccacttaacttcccagtccttgtgatatgcatgaaaagaatttagaacattcatatagaacatagttaaacaaagtgtgaagcagagaacactctcaaggaatgagagtgacaatggccaaagggcccactgggcctggctacatctcagacacgctttagactatttctcaagtctctagagcacatagctgtcctgcacctagcatgcccttttgatttaactctttcaggaacaatcttctaaaaacgaggtaaatgtttatttactaatgactttgccagcagctcaggatgccacgtcttctcccagggtcagagatgtggctcaggacccattctctgaccaatcattacagcccccacgtcccagtccttgttttcctggtctggagggttaatgacctaaaagtctaaggccaagctgagaaactcctaacagaaaagttgagaggctggtagcgttcctatgttggcagctaggctctgaggagctcccaacaaggtaccatatcaggggaacagatctacagatggaatgttcttctaaagttgccctttctgccctagaaaaccctcaagccccgtgtgcctgggtacacagtatccacttgtgaggagtatccactgctacccttcattgttctgataaaaggacaatgtgcttctgttgaagttgctctcttacatcttcacattgcctacagtagtggttctcaaccttcctaacgccgatacagttttctgtttggggtcctgggcccatgctccacttctcccacccacctctgcactctagcggctgacctaatcatctggcatcaacaggcacaggctttatctggatttgacaatgaaaggcaaagcagatgaaactgtggaggaaccggaggtcagggtgtttctctcaagacggtctctgccttctgccctttgccacccaccccctcaagcctgcttgctagagctactgaagcaatgttgttagcagctgattggctcaaataacagaagtcgtggttctggaggctgaagtcttgagtttaagttgttggcagggttactttctctagaggcctctcaccatggcgtgtgatggactttcctctgggggtgtgtctgtgtctaactttcttctcataaggacagcagaaatacaaaattggaacccacattactgacgtaatttacctgaactgctgcttaatagatagtcctatccccagatacattcatatggtaaggtgttaagggttagatcttcattgtatgaatcggaaatgggagagaagtcagtctgtgataagtgagcacctcttccactgactccgctggtaaaatctgcccccctaagccccgcccacaccacttccttggagattattaaccctctcctactacttctaccatctgtttcccccagataaaaattagctcctctgtcccccaaaatgagcatgtgagaagtggtacctcattctcaaaatgtctaggagtcattatgtatttgggagacactctgcttctccttgcagacattaatatcctctcatttgcctaccggttctcctgtctcgtgggggactgaaccaagggtgaaggcttgcagtctgaagctgggctaggcacagaatctcagagtcaggtactttgctcattgccacaacagaatagttaacaaaacaagggtcactcttgcatacaattcaagaacacctctatctattatgacagggaagtcaatacttgacaaaaacaaacggaaggaaggaagacaagtgttactcttgcatacaattcaaaggcaggtctctctatcctgacagcgggtgccctggcagcgacagcaggtgcttaaggcagtcggtcatgtccatccgttgtcgggaagcagagatgaacactggtgctccacttgatttctctgttttcttcattgtagatatcaggtcacagttaggatggctcttcaacctcagctagctagcctcatctaggaaaatactgtcctaggcatgccaagagtttgtctcgtgggtggttcttacaatcaacattaaaccatcacacacacactaggttagatagagacctatccgccatcattctctcacctgcagattatattaggagaaatggggatggaacacaggcaaggaacaatggccacatttttgagccctgtgatgtctgtgtgtctccccttctccttggctctcttccctcactctggatacttgtgctcaagtaatctcctggtgtgccgaccttgaactcccgccagaggcctccaactgggaggcagcaaactcagaacaaagaaccattaatagtgtgtcctgtattgactatgcctttgttcaggatggtatacaagagtatctttataacacaaaatatgaagcgtcctatttgtccctcctgactgctgctgtcacttgtggcctcatgtcagtctcccttgtcctgtctggagtttgggtgtctctagtctaggtatgtgcccaggtctccttcagcaccatctgtcgtcttcccatgccccagttggcatgtacaaccttttgaccctgtggcagcatgacattgttatttacaaggttcatatgagatagctatgtggccaagttacccaccccccaaagtcacaaaaatgcatgatgtttaagtacatttttactttgtgttgggccatattccatggctatattggggcttattaaggttgcagatcggacacatgtataagtcatgtctggtcatactgcctgtcagttagtgggagttctaactctggtaaagccactctagttggcattctaaggtcctcattgatccctgctgtctctgttgcctgagccatagcacttctgcttgcatcctgagccccacagatctgtacccacaaaaatgtgttgcccacaggagagttctacagagcagacaccatggtggtttcctccacagacacatgcacacgcccgccataatcaaccttgtgcggctgttcttcagtagcactgtgacatgacgtggcctgaaaacaggatttttttcagacgtgactcgttcctaatttaaatccagcatgggaatccctccctgtatggtttgacagccagcaatactttctatatgaatcattccctcagtcttcaaactacttactgcctggatacacaggcatgtgtcttgctcccttacacggaattgtctaaacagttaaggaaaattcactgcccttggcatgtgttctacacgtggactgagaatagttcaagactcaggaccagcatgctcgaagtgcccgtggctaccaatgtcaagcctggaaaccagagtgggagaggtcaggacaggtgcccagagtgctgctgttcttctacagctccttaatatggcactgggaacctctcaagaggaaaactactatgcagagaactgtttgagtcggtggcagcttccagatgctcaattctgtgttctgctaaaaacacaaaattggagtctacacttcctcttgcatgtggtcatcatgaaaaagattgtcacacaagattggggtgcaaagagctctcaaaaacctgtggaggcctccagaaaaataaatcagaatgtgaaaaccctactgtcaaccctgctcagaattagagattggatatcccaagtagtgagacttctttggagatcaaatttgtcagtctgtttatgagcttagaagtctgaatatcaactaaacccagtattctctcctatatccatcagtcacagctcactcgtgtgttcctcatcttctccagccccacctacctgcctcagtcattgtagccaaccttccaattctactcacattccttctcctttcactggattgctgctaccagcaaaccccagctctgatcatgtgctttctctgtctcagactcatcccacagaaggacgactctaagctacctcagtcctccaagctcctcgcttgtcctgcccgtctaatttctctctcatgtcttccccttcctccctgaattttggaggccatttacagtgtgtttagggacatgttaccaatacctgttgtgcacatgtcttagttcaagctgctgccataaccaaatgctataggctcagcggcttgatcgacatttatttctcaaagttctgaaggctgagaagtctaagtaaaaaaaaacgctactaacgatcacaagataggacccatggtggctagcttttagtagataccttggtatgtgcttgtcttagtcagagtttctattcctgcacaaacatcatgaccaagaagcaagttggggaggaaagggtttatttggcttacacttccatgtagctgttcatcaccaaaggaagtcaggactggaactcaagcaggtcagaaagcaggagctgatgtagaagccatggagggatgttctttactggcttgcttcacctggcttgctcagcctgttctcttatagaacccaagactaccagccccagagatggtcccacccacaaggggcctttcccccttgatcactaattgagaaaatgcctttacagttggatctcatggaggcatttcctcaactgaagctcctttctctgtgataactccagctgtgtcaagttgacacaaaactagccagtacagtgttgatgtaaccgaatatctgagcctagatcatttataaataataccaattgcttttattaggactctagaggaggtccaacatcacagcattcacgtctggtgggcggccttcctaatgtgttgtcccattgcagaaggcaaaagggcaaacaaggaaaagatgaagaaaccccatgcctcattggtaacagtattcatctcttcatttgtcctaatcgcctttccaaggtctcagctctcagcatggctgcattgggattaacattccagcacatgaacttgggggaaacacccacactactacagtgaataggaagtggtatcagaatagaagacacttcagcagtttgagcaacaggaattcctgaagacggctatgagaaggttgggtggagagaggttttcaacaggaagcagcaatgcaaagaagctaaacaaatataagttggtttatataaaaactagacaataggcctctgactgaagccaagataggaaaagaccagaatctaaaattctgtaagctgggcatgaaatttagatttattttattaggcaaagaagagatgtgattgaatttacatatagaaaagagtctgctggtataagcatagtcatagtcatataggtcaataaaatagaactcatacatgcatgttcctctgtgtttcagcacaggtaccaaaccagttcattcaacggggaaataatagtctcatcaacaatggtgctgagactgaggagtccacaaaagaaaagagagggtgatgagaagtgaaaatactcaaaaaagaataattcaagatgaatgaaagagctaaatataagtactaaaaccatacaatccttaaaaggaaacttttgagttagcaattatgacctcagacttggcaatggattcttagatatgacatcaaagcatgaacagcaaaaggaaaccatcactcacttgtactttattaaaaacttgttgggggtgggctgggctggagagatggctcagtggttaagagcactggcttctctcccagaggactctggttcaattccccagcactcacacggcagctcataactgtaactccaattccaggggatctgactccctcatatagacatacatgtgggcaaaacaccaatgcacataaaataaaataaattatttttaacaaattaaaaacctgttgtgctttctgatgtgactgtgtcaactctatcacccaggaggaagcagatcaccacatttgcatctggctgggttaaaacttcctatttcagcctttttcatcttctagtttttccccctaatatctggagctagccctctacctgtacctcagagagtgaagggataagagtctgagtcattgctcactttctcccagccaagctgtcagtctagggttctctactagccccccatggctcatctcatgctcaccttgtggaagctttccaaccccttcaggctgtctgaagtcttccttgttttctgtccagacctccactgcagtgcttcactatgctgtggtggaagccctccacagcctccccccgcccccattcctataaggtctgtggttagagacccacagattcctcatggtactttttaaagcttcctgctctgtactggcaaattgttaatcagtttgtggcagcataaataaaattagaggctttaattaaaactaatgaacgagtgagtggagaccagcctggctgctctgctctctcagcctcagagcagtaaataatgaaagtgtcacacatcaagtgatgtgctttagcaaactgtaagggcagcagaaaggagaccacggagcactgttccccctgggtgtaatttgcaagcgagtgaaatccccatttcgatgtttcttcgtaattttgcaggaacttttcctgtgtgctggttgccttttgttgcgcgctgctataacagaataccacaaattgggtaacttataacaaatagagattttttttcctacagttctgaaggctgggctgtcctgtccaaaatcatagtctagcatcttagcagtggatttctgttgccaaactcacttttgtaataaactgtaactaacccacttccccaaccacagcagcagtctatgcacatgagaaaggctcccgttgatggtatccttggacttacagaagcttttctgtttcatgaggtcccacttgctagttattggtcttagtgcctgcattattggttcaggaagttgtctcctgtgccagtgctttcaaatctatttctgatttctatcagattcagtgtgtctggttttatgttaaagtctttgatccacttgggcttgggttttgtgcagggtgataggcagcccacagaataggaaaggattttcactaactccatatctgacagagagctaatacccaaagtatataaagaactccagaaaccagacatcaacaaaccaaataatccaattaaaaaatgaggtacagatctaaacagagaattctcaagaaagaaatctcaaatggtgagaaacgcttaaaaaggaatgtttgacatccttagccatcaggggaacacaaatcaaaacaaccctaagattccatcttacacctgtcagaatggctaagatcaaaaactcaagagacagttcatgctatcaaagatgtggcgcaagggaacactcctccattattgctcatgggagggcaatcatatgggggtttctcaggaaattgggaatccgtctacctcaagacctagctatacctctcccgagcatatattcaaaggacattccatcctaccacaaggacactggcttaactatgttcatagcaggtttattcataacacccagaagctggaaacaacagccctcaactgaaaaatggatagaagaaaatggggtacggtacatttgcacaactcagctcttaaaaacaatggtaccatgaaatttgcaggcaaatggatggaactagaaaaaaaaatcatcctgagtgaggtaatccagactcaaaaggacaaacatggtatgtactcacttataagtggatattagctgaaaggtaaaacataaccatgctacagtccatggagccagagaggctaagtaacaagtgaggctcaagggggagacaaggatcttcccgggaaggggaaatagagtaggtatcgccgccagtggactgggggtaggtagggttgggaacagaagggttgagggagagaaaaaaaatactaacagaaaaattggaatggggcgcatatcagaggtgaggtagaaacagcacaatggaaactcaatggactacgagagtgaccctagcaaagacatctaccaacaggggatgcagaatctgaaccagccatctttgtaaccaggcaagacctcaaatggagggattggtacatcaacccagccacaaaacctttgccattcgttgtgtcctgcctgcagaattttctgggaccaggcctagcataattatcatcaaagagaccagagaacaactgctccagcaactgatgggagcagatgcagtgtcccacagccaaacagtaggcggaggagcttgggaactgctgtgtaggaggaagaggaaggactggaggaaccagagaggtaagggacacaccaggagaatacagcccacagaatcaactgactgggactccagagtgctcacagagatcagggaacctgtaaggatctgacccaggtcctctgcatagacgttatggctaagtatcttggtgttcttctaggattcctaacagtgtagagcagggactgtctctgactctcttgcctgcttgtgggacccttttcttcctactgggatgcctcatccagctttgatgtgatggtatgtgcctgatcttattgtagcttgttatgctgtgttggattgatgtccctggaagacctgcttttttatgaggtcaggggggtgtatctgggggagagatgaagtaggaggagagactgagggaggggagggagaggaaactgtagttggggtgtgatatatgagagaaaaagtttaaattaaactaaagagagagcaaagaattcccacgatctaatcagcttgtttaagcattcccctctgcacaccattgctctggggagtaattttgtaagctatagattggccctcttccttccaaaaggaaaatcacactcaggatgtcattctccatcctcatgaaggggagttgcatacacaattgtagggccacaccagacttttaggaatcaggagttggcattctaatatttccaatgtacagaatgccaaaagaattatcctgcttggggttcaaatgtgttccgcggtatccctatgggtaggaagcacattcatcattagctgcgtgtagacttgaagtccttgtaaatgtgaagtccactctgcacagctttcatatggaaggggttttctgggaatgcagctactccgtgaacggaggtggtcagaagtcaggacggtattctttttgaggcagtgtattaagtagccgaggctgtctggaatttgcaggcctcctacatcaacctccaagtgctagggttacacgcacgcaccaccactggcatcactgttaacccacatctgcagtggtagcatccctcctcgtgtctatagtttctcacttctgtcagtctgctttggagctcctcagcctcactatgactctacacacaggcacatgcaacttgctactcattttgtcattgtaagcttttatgtgttgaaattaatatttttcttataagttgcttccttccctcttattttctttagccaagtcatcatattgatatggcatgttctaactctcctccacccagagtgtgtgtgtgtgtgtgtgtgtgtgtgtgtgtgtgtgtgttatcaataagtacattgggcaggtgatttggtatcattgcccatgacgaatgttgccatgaagataatagatataaactcactacatagaccaggttggcttcacagtcatagagatccacctgtttctgactccaaggcatttatccatgcaggaagtgagggaataataaagtaggtgtctgtggattccctggccccactgtgaatcatgcttgagctcagattctatctcctgactaccatcaacccacactctgactggtgggtcacttggtatcttgggtccccaggaatcagagtcaactcagaattaatgtggaatcagagtcaactcaaaattaatgtctagtgtgatggtctgcatatgctcagcacagggagtggcactattagaaggtgtgccctgttgagatggttgtggctttgttggagtaggtgtatcactgttcgtgtgagctttaagaccctcatcctaactgcctggaagccagtattctgctagcagccttcagatgaagatgtagaactctcagctcctcctgcaccatacctgcttggatgctaccatggtcctgccttgttgataatggtctaaacctctgaatctgtaagccagccccagttaaatgctgtccttataagagttgccttggtcatggtgtctgttcacagcagtaaaatcctaactaaaacatctagtaatttgggaaaggcccagaaatgtctttatttcaaatgccaccactctaacaaataggaccttttggagaaggcttggcataagatttacaagccatatttaagacagagatgtaggaggcacacacacacatacacatacatacacacacacacacacacacacacatacacacacactcacacacacattcaacagacattgagcttgtgaattgcctgccttgagacagctcaaaagctgtggctgcagtcagattcttactggcaggacttagagtattttatattatacatatcaaataatactatagtaacatgtgtaccaatttcatttctaggaataccatgaagaattgaccacagctgaagatctccctggagcagggaattcttatggtgaaggtctcttggctgctactggtctggactctcaacgctgttgaaaactgagagctccacccatggaaggagttacagagacaaagtttggagctgagataaaaggatggaccatctagagactgccatatccagggatccatcccataattagcctccaaacgatgacaccattgcatacactagcaagcgtttgctgaaaggaccctgatatagctgtctcttgtgagactaggctgggggcctagcaaacacataagtggatgctcacagtcagctattggatggatcacagagcccccaatggaggagctagagatctgcaaccctgtaggtgcaacaacattatgaactaaccagtcccctggagctcttgactctagctgcatagtatcaaaagatggcctagtaagccatcactgaaaaagagggcccattggacacgcaaactttatatgccccagtacaggggaacgccagggccaaaaagtgggaatgggtgggtaggggagtgggggggagggtatgggggacttttgggataatacatggaaatgtcattgaggaaaatacgtaataaaaaaatattaaaaagaaaaagaaaactgagagctcattacagtgttagcatcccctatggatacagctgacctacaaagagaaggaacacacagctgcttgggaaggcaggtgtcatgttcactaacgcgtttatcaattcctttgtggagacgtgtcttctggggccttcactgggagcactggcagggacagacgttacagttggcacatgataaatcctatctcgctagtttttgcattcccatctttatcgcgttctagagaagctgtagaatcccgtcttccttaaacaaagggaagtgcgtcccccactccagtcagctaacgagaagagctgtgaggaagactctctggtgagtatcacacacagtaatatgcagctgtatccctggattagagttgatctactgctatgcctctctccttggtctaacatctttaaggtccagcttccccttttccaggcctctaatggtatatacaccatcaaaatcttggaatgtttcttggtgtgtaagctatttgggggtgagtgtgttgtggtttgaatgtaaaatgcacctccccccacccccaacaggctcacatgttgaaagcgttagttctcagacaacggcactctattgagagcttatggaaccttaggtagaagaaggttgttagaggtggggtcccaaggataaaaacacgacaccccgcccccgccattcttgttcctgcttcctagtttggcaagacatggaaacagtcacaactaacactatcacacatcaacttccttgacataccttccctgccactatggaatgccttcccagaaaccaggaaccaatataagcccttctccatctaagtttcttccatcagatacattgttacaaggctgtgaaaaacaagcagctaatgacagacagggtatgcagctggagcacgctgagatgtggccttagctctgggtcccgtggcaacagcacgcaggttgtttggttttgaaaaaggtgggaactacctttttaggcacctgcctcaggtaaggtaccatggaagatccagacacaagcagactgatgttttcaggtggcagaatcaattggaggttcaagtttaccagctgcttctgggggtaaccaaaggttcccatctagttcccagaatcacattcttccacagccagagttcaaaccaattaattttgtatttgatttttggtgttatcagtccagctacaagaaatattttttatttatcattatactttgtatttattttattaaactctctggcttccaggtagagcaaaactatacttctcattttctcttggtagtgttcaaatgtgcttaaaaagaaacccaacctcacagtcatcagccaaaaaatggtggaagagaagctggagagacaactcaggagttaagagcactggctgctcttccaaaggaccagggttcaaaccccagccctcacaaggcggctcacaaccatctataactgcacttccaggggatctgatgccctcttctgacctccacgggcactagacatacatgtggtacacagacatgcatgcagacaaaacacctactcacataaaataataaaagaaagttttaaaagaattgatagaaaaaaatgtgatgtagattcctttagaggatttatgtgtgaactacatggaagcaaagactcttgaaaacacattacccagaaaacctgtctaatctgtcagtgcaagaaaaattaagcacaatgcatcctgttgacgtcacttcatcctgaaatggtgacatcctcagtgactcacattttatcatcacgagcaacactgccaacctaaatgtcagctaattgaataaaacaaggttgaattagagagcagccaccagcctccaaccaagaggacgaaaggaagcttccagaacaagataaggaacttgagggactgtgtgtggaacttcaggtcaccttggatgattacccaaaatgaaagaggaaaaaccattttcaaccaaggaaatttgtgaactagaaatttaccgttccaggaagagagttccagactcgtttcacctcctacccacagccttcttttacgaggtctcgcttgcatcagccctctgatgcagagatagcacacattggattgcaacttcaccctgtccacgtggctgtaccagctctacatagagtcacagcaagtggcagctgaaaagcatgcactgggcactgggcactgggtggtgactcccctgtcatcctgcctgagatcacagcctctgagctccagatcactggctagatgtgcccttgggccagatcactgtccctgcctggccctgcaacctctccaggtacctgtggctgtcctccccttctgctttgcccctctagtagacaagttgtcttgttacttatgagcaccctgaatgaattaaatcagcccctgggaagaatgcctgggggtagggggtatctcagtttgtaaaccaagagcactttccaacattttatatcagtgcattcaatgctgagtttcctatctttattctattcccattggccttctatgttcgtttgtgggtttgtttgttttgtagcaccaagaatcaaactcaggttttcacacaaactaagttctcaaccactgggccatatctttaactctgagcttaaaatttatataatagagtgtattaagtaacattctataaaaattagaagcttataatcacatcaagtaggctggagaaatggtttaacagtaaagagctcttcctgccccacacacagacagacagacagacacacacacacacacacaatctttttaaaaagattttgtttgtttgtttgttttgagacagggtttctctgtgtagctctggctgtcctggaactcactttgtagaccaggctggccttgaactcagaaatctgcctgcctctgcctcccaagtgctgggattaaaggggtgtactaccacgtctggcaaaaacgattttttgaaagaaaagaaaatgtggtttgtatacaatgtaattcttgttcagtcataaagaaaggtactctgaattcaactggagatacttttaaatgaattaaatcagtttcagagaggcaaatattttatttttcttatttataaaatatatagatatgggatgtcatgcatgtatatttgacatcaaagtagaagcaaaactatcctggggaacaaaggggactaacagaggagagaaaggggagggagaggtgcccagagctcagtctatacagctgtatatttacattaaaatgtccctctaaaacccattaccatgtacaatgaatatatgctaatcaaaaatatctttaaaataaaaactcagagaaaagataggaaacaggatgcccaagatttttattttgacttaccaatttaaatcaatttaaaataactttttaaaagaaaataaatggtggaatgagaggggtcattgggaccgctgtgctagaaacccctttcaggatttgccatgagctgcacatgggagatggctttggatcctgccgtagcacagcctccctcggtaacaccgttccaagatattctaaatttacatgctcacaggatcacttttacagctagcatctattactttctcaggaaggcacctatcatagtgtgcataagtttaaaatatgctttagaataaagaatttggaaaagataagtatgtcagcgtcacagcagagaatgtagggttacaaatttcccagtggagggcactggccacctcctccctgttctgtgtctttaaagttggagcaatgcattgctttctttatctagtgggaatatgcaggagatgggagccgacacatggtaaggtcctaggaaatggaaaataaaggaaagctgcttcttcttctttaaggaccatcttacatcacagtcatcaccattgccgtaaagggtccgagaggcagacacttgacctcccaagagcttacttctgaagtctgttaactagtcatattaactagttagcagtcatgttaactagcctgccacaagccctcctagctgctgatggagctgcatcaaaaaaccatcacaaatagaagacatcacgagttgaacatgcgtagctaacatactgaatgaacatcctagctgagccactgagtgttctgaacagtctcagaggtttactcatgcgatggagcctggcagctatgcccagaaagtaaagaaatacaggattgtgcaccgttagctccagaaaaagtcagcatcaatagctgaagtataacttattgcttttgcactaggataaagctgaaaatcactaaatcagggaccacctcgatatgaattcttaagacgatggctggtataaagctattataaaatctgagttgttattattgctaccatcaaaaaaaaaattcccatcccccctcaggccactagaaccagaatccccagggatggcaaggaaaggtccttagttccccattctctggagagctgacacactctgagtgtgacctccagaatccagcccaggtggcacattctctgactctgccctctaagaagggcctctcccttattcatccacctcatggcttccctggtttgtccaaggtttcctgtgtcctttgagcttcccgactggtctccactgctctctcggcctgacttcctctccagaatagttaccgtctagacatgatcattttttcctcaaaagtcacccttggacatatctcactggagaaatacaacatttccttttgtaactggctgttctagcccatgagtcattgtggcgaggacacaggttggaacccggagttggggtacagaagccaggggaaaccccaactgcatcaccaatattggagaaaaggatacgaaatcttctcaaacaactcatcagcccagggagcgcagttttactaaaatatttaaagtggggtttctcagcatatgagtcacgacccttttgggggtcaaacaacccttttacagggaggcatgtaacagatgtcttgcatatcagatatttgcactataattatgaagtagcaacaaaacaactttatggttgggggccagcacgatatgaggaactgtattaaagggtcgcagcgttaggaaggttgagagccactgatttaaagccttatgagggagggcatgagaactgggaatcacagcctgtgtgctgtgtggtgttttctgactgataaaagaatttctgctttcggtccagcagagagaaagccagcctcagcaagttttcagagtgggagcaatttggaagtggtttggaagagttcaattccctgcctaaaggtctaaacaagctgaaactggagctttttatacaaatggttagaaacgaaagcaaaaaaaaatttcatcaagcaaaggtatgtgtgcaatacattggccccttggtgtcatttgaagtaaattaatgtggaggaccaaagaaatggagtcggcaggatgcaacgctccagggacctgcctgcgatttcgttcctattgtagcaaaaccggtgctcccagcgaggcttcagggaaaactacaacgtgcttaagtaagattaatcagtaaagcaagcgtccacctaatgagtcatctttgacatcacaaagccaggaaaatataaggctgcagcctggcggctgtgtactcccagaagccacaaaaccggagccgcccacatgcgtgggtgggtgtggtccctgagcacacttgtctcagcgaagacgagacagaaaatgacagcctcctgggtgctcttcactgcagcgggaagagtaggggtggatactaaagcaagcctcggggggagggggtccatgtctcctcagcagccctcctggatttcaagaagctctgagggactgtgtttctatgagcaagtgcagagtctaaataatggtgttacacacatgtaatctctgcactcacgagactgagacaggaagactacaaacttgacatagttttggaaatacacagaagactcccagtctaagaaagaaagaaagaaagaaagaaagaaagaaagacagaaagaaagaaaggaaggaaggaaggaaggaaggaaggaaggaaagaaggaaggaaggaaggaaggaannnnnnnnnnnnnnnnnnnnnnnnnnnnnnnnnnnnnnnnnnnnnnnnnnnnnnnnnnnnnnnnnnnnnnnnnnnnnnnnnnnnnnnnnnnnnnnnnnnncggaaaggaaggaaggaaggaaggaagggaaggaaggaaggaagaaagaaagagaaagaaagaaagaaagaaagaaagaaagaaagaaagaaagaaggaaagaaagaaagaaagagaaaagaaagaagaaacagaagggagggagggaaggagggagggacggagggacggagggagggaggaaggaaatctctaactctaggaaccccaggagtccagagcaagtgagatcacagctttctgaactacatatccccagtcacttctcagttttgaaagttctttaagcactgggcatgctgcaatcaatgttctctctgttggcacagtaaacagtatagccccaagagccctaaccagtcctccagggttagcggtcaggctcccaggtccctttcacagatcctattgctatagacctgacccctaacccactatgcccctgtccatggtccaactggcagcccagcttcctccacacgacccaagagcagcatccagtgtgttggtatgtggtcccctggtttaccctgacagtccttgacaagaatgccccattgtgcttgctttctcaggtcactgtgcacaggaggggcttctggaactcttcctcagtgtacaaagagcaggggggttggcaatgtggccatgtattagtcaggattctctagagtcacagaacttatgcaatgtctctatctattaagggaatttattgtaatgacttacagtctgcagttcaactaacccaacaatgggcaggtgtaaatgggaagtctaagaatctggtagttgctctgtttcacgaggctaggtgtttcagctggtcttctgtataagctggaatcctgaagaagcaggttccaacagatgtgctggccagtaagtgcaagcaggtgaagagcggtgagtcttccttcttccattgtccttgtgtaggcttccagcagaacgtctggcccagaataaaggtgtgtgccaccacacctggatttggaacttgcttagtcctaggctggccttgaactcagaaatctccttgcctcaatctcctgggattaaaggcgtgtaccaccttgcctgggcctaagctttacatggccaccatctaccaagatcttcgtcaagatccaggtcagaagcctgtgtcttctagtctcaggatctggatcacaagtgtaccctccatttctgaattgtacttcactccagatgtagttaagttgacaaccagggataggcatcaccacagtcaaactggtgttctggatcaggcacccccatgcagcctgccagtgagctgagagctcctagctccacttttctgtttctgtggctgttcaccatggccgttccacatctgcaccattctggacactgaggtcacaacagcaaatgacagcacacaatccctgctctgtcagattgtattaaatgtaatcagatcagacaatgacatacaccaagatagaagtggtagaaaaccctgtgacagagggaccatagccactcagacagacaggaggaaaactagatagcatgctgagtgaaaactgctgacaggtgaagcttttgttgtttgtttgtttgtttgtttgtttgtgacagattttctctgtgtggccttggctgtcctagaactcattctgtagaccttgagttggccttgaactaacagagatctacctgcctctgcctctagaatactggaagttgtacaacacaaccagccagcaacaggtaagtgaaggcttgatcactacgaggaagccaacgggggaagagtgaattgtgggtagagaggaacagaggtcacagtgaatttaatgcctatccccacaatttctaggaatatattccgacaccctagagggtgcctgtacattgagaatgtctgccctttttctttttttggtttttcgagacagggtttctctgtatagccctggctgtcctagaactcactttgtagaccaggctgacctcgaactcagaaatccacctgcctctgcctcccaagtgctgggattaaaggcgtgcaccaccacgcctgctctgccctttttcttacagcaagtactttatggattttctttgaaatatttgaattgccagcatcagtgttcttgggctttggggccatgccaaccatgccaaccatcctgatcaccgagatggccactgaatgactagcagatgggtagtggataacaaaggaacgagctatgtctggatggggcagagtagtatgacataagatttcattatgctcctcagaatggcatgcaacccatgaattacagtttatttctggaaattgctacttagtatttttggagcatgactgatagtgagtaataaatttcaggaagtaaaaccatggagatgggaaggcattgaacctgagacctgggcgagatgggatcacactcagtcttggggcttctccaagtcaagtttactattgctgtgatgaaacactacgaccaaggcaccttggatgggaagggtttgccttatgcttccacgccactgttcatcattgaaggaagtcagggcaggatctgaaacaaggcaggatcctggaggcaggaactgaggcagaggccataggggtgctgcttactgccttgctccccgtggcttactcagcctgctttcttatagaacccagaactgccagcccaggggtaaccctacccacaattggctgggctctcctctcattaattaataattaagaaagcatcttacaggattgcctacagcccaatcttatggaggcatttttttaattgaagattccctcctctcagatgaccataccttaggtcaagttggcataaaactagagtccttcttgtttgaatattctcctagacttaatagaaaagcactggatggtttggtaagagggatactatattttgattttggaacctcacaccccaccaccaccacaccacgcctgcccacctgccagagcatgagtgggtgataggggagcagctggaagtgaagccagctgtttttgaggctacctgaaggcactgtgagcctctattccaaatagccaaggatttacagaagaaaaagcagcagttcctttataaagcacagtgtgtgtgtgtggtggggggaaccaggcatcgggcaataggaaacagccaatggggcacgcccagatggatgagaggaaaatggaaaggcaaatggacagctgagaaatgtcctttcgttagccagaatatctcccccaaagatgcagagagcaagtgttgacaaagggggagttgaggtaaacaaagctcattagctgccaggagcatacatctgtgacacgggcggctaccagcaactctgcacagatgtctaagcagtgtttcggtcactggtcacttagaaaagaggaagcaggatgcaagcaatattttaaaaagataaaacagctccatcacttccaagggcctctaccgcttcacgtgtttttttttttttaattttttattaggtattttcttcatttacatttcaaatgctatcccaaaagtcccctataccccccctgccctgctcccctacccactcactcccacttcttggccctggtgttcccctgtactggggcatataaagtttgctagaccaaggggcctctcttcccaatgatgaccaactaggccatcttctgctacagaagagcagctagagacacgagctctgggggtactgattagttcatattgttgttccacctatagggttgcagaccccttcagctccttgggtactttctctagctcctccattgggggccctgtgttccatccaatagatgactgttagcatccacttctgtatttgccaggcactggcaaagcctcacaggagacagctatatcagggtcctttcagcaaaatcttgcaatactgtctgcgtttggtggctgattatggaatggacccccgggtggggtaggctctgaatggtccatcctttcatctttgctccaaactttgtctctgaaactccttccatggatattttattccctattctagggaggaatgaagtatccacgcgttagtcttccttcttgattttcttgtgttttggaagttgtatcttgggtattctaggtttctgggctaatatccacttaccagcgagtgcatatcaagtgactgctttatttataatagccagaagctggaaagaacccagatgtccctcaacagaggattggctacagaaaatgtggtacatttacactatggagtactactcagctattaaaaacaatggatttatgaaattcttgggcaaatggatgtatctggaggatatcatcctgagtgaggtaacccaatcacaaaagaagtcacttctcgtgtttttaacaaaccacaatagttttaaaaacttgtaatcatgaactttaggtgcttaactccgggatgggatggtgtgtgtgtgtgtgtgtgtgtgtgtgtgtgtgcatgtgtgtatggggggggagggagttgaccatgtgcacagttgagctagagacaaaaatcagatcattaaattaggtgatgaattaaccttttgtaatcagattctctgtgacatggcactctatcacaaatctttctccttcagtctctatttttctcttggcatttaaagtatgacatataaataaaactctgcctggctaaagaagataaatagtgtattctcaatagtaggagaaacagaaaattcaaatacattatgcatattgctgtagatcctcagaaactccaaaactggcccagtgtctgagcctggtgacaagcaaagcccacagtgacgagctcacagcagtggctgtggagccaggtcttgagacctcagcgtcaacccatacatcggctacactgggacctgacagtctcatagcccagttcccctccagctgttttgggagtaacaccacagagctgctggctctgccgcatgcccagcccagcactctgcctctcttgatttagcagtcactgtcactctgtctggactccagctagtgcagcatgcacaagcctctgtctgtgatgctgagccttgtcttcctcagtcattcttcatgttgtattttgaggcaggatcgctcacttgaacccagaactcaccaattcagcaagtacatctagtcagcttgctggttgagccatagcctctgccttctgagcactagaactgcagataggccatcttgtacctatgtgggtgctgggaatccggactttagttcttatccttgtgcagcaagcaccttaccttctgagccctccccggccctactcttgtttcatgtgtatttgcacggtggatgtttttgttgcaccctgtaagttctggaacactgtgtttatgcttttgttcctctgagcgcattttccagtttccctgtgattcaggaatctcttggttaagtgtatattgtctcgttcacgtgttatttgtgactgccacagtttccctttctcctgtttccagtttcatcacggtgcagtcaggaatgactcctgataaatctccaatctttgttgaaaaggcagcagatgtcaggggcattggagaattgagcagaaaaaaagctgtgttttttcatcctcgctcctcctcctcctcctcctcctcctcctctcctcctcctcctcacctctgattggacacagccttcaatttatcggaagagtttccatcatactggagaataattcagccctcagctgtatctcagctctgcagcacagcagcaagggtgtttgtcttcacatgcaatagaccagcacttctcaacctgtaggtagcaacccctttgagaagtcaagcgaccctttgacagaggttgcttaaggcccctggaaagcacacgtgtttgcattacaattcacaacagtagcaaattacagttatgaagtagcaatgaaaatacctttatagctgggggtccccacaacttggggactctattacagcattaggaaggttgagaactctgcaacagatggaaacttcatccaaaaatcaaatcaaacaatttctgcaaagtcttcttcccactctcaattcctatcctaaagttagccattgcttgtgctgtggatatctgacgatacactcagtttgaaatccagatccaaaagattgaaactgaatatttaccccccaaataaaataatgacaaggtttatagatatggcttacatttgtacacatacaaggagaaaggaaagagggtataagatgtcagaagcaaggcccagtaactcaatatacacacttgagcaagtgtctacacaaagaacacacacacacatgcgtgtgtgccaatatagtcttcaagcccatttgcccccggggatgaatttctaggcttctctcataaggtcagaactttcttacagtccccacatttgggctgaggatgacctaaaaaggttatggatcaaagaaaaaacagattaagtcctcttcaagaactctcagaacacaaacagacaccaaggctaatcctccaagacacgtcagcttgctgtctacatcgctctcaagacaaatcctgtgcatcccttacgagaataaaggggctgggtgtttaaatacatttggaaagaatggacaaaacttcagagatgtcctagagtaaaacacagcacaagaacccaacagctgccaagcaggcttttcagtctgctctgtgcagcccaggtccccgtccttcatctcaagcattgtcagtgtctgagatgcaggaagctccagagaagtcacacgagaaagcaacaaacccattgtcagagaccaaagggcttgggagttcaaggtaaatgctctaaagtcaaatttcaactactttgtagcatggtactcagtggtactacttcccggaggggtacggatgcttcctccgctgagagctcctgcgggtttgaagcttgatccttgatgcaacagcatgaaaaaggtacccatagatgaagaggccaggagagctccgccctgcccttgctaatggaattagctacagaaccagcgcagtcctcttttgcatgccttccaacatgtgaagatacctacagtggtataattctggaagaagagactggcttcaccacacaccaactctccatggaccactccagcatctaacactaagtcagtttctgagaaagtaagtatgtattgtttatggaaagacctagtcctgagaggcatgccagctccatggagcagcagacacgcatgtggagggcaccagagggagccacggcgatggacaagtctgtgggaagaggaagagaaggtgaatggcttgtgctctgtgaagagaagaggaattgggagcgcaagagtggtgaggaacagcctgatgagtagcaaacactgtcacctgaggccatggtaggtctccacccatgctgccactgagggccttgtcttagtccatgaccctgaaaccacaggagtctgtgtacatgtctgtatcaccaaaggccttgggggcttcccttgtctgggctgcctcctggagtcatcttgatgtctaagggcagcacggagctgaccccagccctcactggctgcagaacttgagagaacagttctgccccttgccagctacggtactcaggagagtgagtctgaaccttgcctgggcagcacaataggtctggtcctggtgtcgagggtgcaagggagatgtcctgccccttgatgtctggcagactggagagctggccctggtgtcatggatgtgggagaactagccccactcctccctggagtgatgcaggagagctggccctgcctctcaacagctggagcacttgggagaacaccatgcctaagtagtgtggtagagctggccctggaggtgtgggcatgggagagttagccatagaagatgtcagagcaggacttctggccccagtggcctgggcaagagagagagccagcccagccccttctaggttgctgcaaacaggagagcaactggccccgccccttgcgtggcaaagtgggagagcaggccgactgaacaactcagccatcacccaggcccagattcagggctttgagttggctcacctcaatatctaccccatctatgagctgctggagcacatgaaggggctggtcctgcagatccagagcttcatggtctccaggacacagggcaacataggatactggagaggcttgctggtggaaatccactatggaaaattcagcagaagccagaggccccgaaccagaccaatgacttagtcaatgaacagttgcaagtaaaggtgtatgggccagcagggcgtggtggcacacgcctttaatcccagcactcgggagacagaggcaggtgggtttctgagttcgaggccagcctggtctacaaagtgagttccaggacagccagggctatacagagaaaccctgtctcgaaaaaacaaaaacaaaaacaaaaaaattgtatgtaccaaaggatacactgaggtgggacacactacagcttccacaatgagattttttttttttcttttgtggaggaggttgcaagtccagggagatgagggggatcagggtgcatgatatgaaacacaaagaatcaacacaaagtttctttgttttttcttttttttaaaagacatagttaggtattttgtataacagctcaagtagaatagtacaatagtacaatagaatagtgctaagtttatctgggaaatgactccctactggagatagatgactgataagctgataagccttccccccgtcctgccttgaggctcgtcaagacctggggatcttctcaaaggtggcctgcaaaccttcaatgatacagggtgtatatcttctgtgaatctcagttctaagaacagcccttgctttgctcttgggccggaagccattagaatgagttctataaggatgtagagactccactagtgaaatttcccttgctcactcttgttttgtcttcacaaacgatatggggccggggaacaagcagagatagggtcaaggacatgattcacagctgtcgctgtaggcttacagttttctaggtggaagaaagaggccagaacactccccaagtatggttaaagctgggcccgattgtccaggaagggctgctggcaaaactcttttgttgccccacacaattgccaagcaagcccttgtagaccatggagcagagtcctacaggtcttctgctctcttcccgcacttgctgactatgccaggatgctgcgggtctgagcgaagccttcactctctacagctacgcttccgtgagaacacaatgtggtctagtccagaagggacacacagcccaggcctctgcaggccccaaacctcttctatagccaggcactaagcagatggaaactcagttccttttcaagaaaaccaggattcaccggaggccacacagcacgtagcagatcctgaactcaaatacaagacaatcaattctttgattctgattttgtccaaattgcctggaagaaggaaagatatattagaaatgatttgcaccaagaacagtaacatagtaaagggggtggggcaagagggaatgatgaacgagagatattagccaagtacagctatacttgtacaaaaacataatattaaaacctgttgttctaaatactaattttaaagcatagatacaactttaattgcctgaattggatatactaatcacctgtaaagaaaaaaggcttacatttcactgagatgtaaaggctatggggaaatcaaatattcactgagaaatgtacaaggaagagagtttattgtgacgaaataaagattaaaatgaaactgggtgagccttgataaaaatcaaaggatacgcctgtcattcttcactgtgaccacatggtggcagtaaagactggcattggtgccatcccaggcaagcaagccatagtcttaaagtcacagatccaggcaaaggcagaggaaatcagaaatgcaaatctcaaccagggtactcccagactccccccaagtaacaccggataccctctaaatcacaaggtactactcagagttgattctagatttctttattttatcaaatagctcctgcctagcttctaaactgcctagttttgaaagaaaagtacagccaacttcatatgacaatctgtttgccattctgaacctcctttgtagtaaaggctagggccaggtgaggttggagccccgagtctttctacctgagtgatagacactcctctttggcctatacccctttctgtcttgacaccttaattacctacctgctggtggactttctcactctatcttgggaaagaatctggctctatatttctgtgtcttggcgccttctgaaggtcagaggttaccctcaatggggtcctctcttttcatagtttcctaattaaaatcagagagcaggagtccgggcctgaccctcatatacaaccatctcttccctagtcccttctccaaatgactggcccttcccagtcctgtgtctcctcccacacacctccaccctcatcacttgcccagtttggactttctacccatggtggctgcatttgggtgacagcgttaccagaagcagacagagcattgcttttaagacaaatctactctagtcttagccctgctacttaaggcaaggtttgcacaagtcaccaaacctcgactgtaaaagagaggcaaaactacattcttgcttttcactagcccatctagcttcatttgtaggtttctgaggggtctccccttctctcaggaagtagagcgttcccatgcctggtggctaggaaccgagacgtcccttttttcagaccttgagaggcagagatgacaaacacgagtgactacaggggtaggagacatgcaccaatcagcacactagctggtgggacccgtgtgacaccaggagccacatgcccttctaaatgctattttgattttcaaacaagagcccgagttttcaaagtcccaaatgattaagctcagccacctgccccaacccatcagctaaagaggagcgcggcatagaaaatggagactcagtcaatgtggtcacaatggggaaaagtgcaggtgttccaagtctgtctttggggtactgacatgagctttggcttctgcagaagaataattttgaacattaagcatcgcttgaggcaagtggctccaagtcttcctcattgcttgagaaggtatgcctgttccttctgcttaagaagtaacttcaggggctggagagatggctcagcagttaagaacactgactactcttccagaggtcttgagttcaattcccagcaaccacgtggtggttcacaaccatctgtaatgagatccattgccctcttctggtgtgtctgaagacagctatagtgtactcatatgcaaaaagtaaatttttaaaaaaaaaaagtgactcttctggggctctgctgttcctgatattcaaggtctagaacaattactgaaaaccttccagtggctttggggcttctggaacaggacacagtaaaagattataagatgcttccattactcatgtctttgtgcgtccatccttgaaggatgctgaaagtccagaggtggtaccagtttttacacagactctccttgaggaatcaacatgcctacaggcccagccagctaagctagagtctgactctaaagagacagacgcaaaacagaggcagagatgccagacttcgttctgctcttagttacctcacaaacccctttggtgtttattcattcattcgtttgtttgtttgtttgttttagcgcaaaccagcttataagcatctgttttaagggaagtcactaatggtttcactgagtgagtagaaattaggatgaacaataagacataggtgttggtatgaagctcaggctgtagcctgcttctcaaggagtctggcagaagggacctatgcttagggaagggtcatgcatagctggaacttcctgacaccatcatatttgagggactgcctggaagcctctaactactgaatgttggaacccagacacaaagccagagtctagtctcctccccagcttcccagactgtctccaagtcagaagaggccagctctgtagttctagcaaagagcccttaatctgtgcagtgctgggagcacttccagtgattgatgtctatctgtaaaaactgtgaggatgccgtgctgataaatcctgctctctaaagccatgaatggccagagagggctgtttggttcgcccagatgcattttagggacttgagtccccaggagtcacgaagcaactcagacccagcattccatatgggtcataactgcagtttctgaggaccagaacccaacttgctttctggcacaactctttgctttaagccctgctcaccacccagctctgcagctcctcttgtaggaagccacaggctcctggtgtgcagcccatctttcggcttcagtaagggaagacagcttcgctgggatctaaggacacttgtctttgtcagataatatgatcactgttggtcagcaactcaacttcacgttggagccttacagccctcttggtagatgggggaagtagatttgaggaccatctctgtgacacagagggaaaggtctctgaggtatcccagctctgtctccttagctcagccattcttcattccagtccattctcagatcctcagtggggacagtacaaaccaacaatcctttatctgcagtgtcaatgctaaaagacaccaaaaagccaaaagatttcttgtgactcatgtggctcccaacactgtctggacttatgtcatttggtgacaaaaacctgacccgaaatgacaccagtctatttatgctgtcaatctttcaaaataggaatatttacccagttgttttgttttgttttgttttgtttttgttttgttttgttttgttttacaaacatcaatgatttgattttaggtaaattaccccaaatcttgtggaggaatttttcaaaggcatagaatatcctgtatatacatcgccttatttccctaaaatatttaaggtgctccattccaacaacaatgaaggcccagagtctcagagatagatttgtggatctttgttgctccccaatggggtgatcagatcacgtatgtgcctagatcacatatgtactcagatcacatatgagactactccttccaggagaggcgtgaagcacagcgatgctggtgctgctgtcatgagcctgccttagctgtacgtggtatgtaacacactgtcttcccagggctccaaagcactttttcctccatgtttttcaaagcatcttctaggtgtcactagttacgcacagtccccatgggatgaccagttcctaaaacagtcttgttagctggtctagtgctctcttgctctagcacaccctcagatggtacccttcattttacatcagtcgccagccggcccagcctgcctgcactccttgtacctctttcctacactcaggagcaaggcagccttacttttcttggcacttgcatttcacataccattcttgacactggaggaagggaccctgttggtcccttaccctcaggggtagacctgattgaagccttccctcctggctactgggcagaagtctggagacatcgcaggagcccctgacttgtagagtctccagccctcctgaaggcaccatatgaagaccctctaggcctctatcccttcccatttggctgttgagtagagaacaagtcaggagagaagctaagcgcaagagctcccatccagaaaggtagcactgcggcctaagtagaacaccctaccaatgagataagcccctgattttgttcaaaagattcacattggtggctttcagataccctgaggccaggccttatccaagatggtggtggctgtaggccaccagggcacgggagccaggggcacaatatcaaagagccactttttgagaccataaccaagctacaatgaggactggaagacctctgacccttaggaaaaagtttttcctcccctctatttgtataagtgctctcagttcagggtcaggaggttctccgcgtctctctgacaggggctctcacagggagggaagacagcctgggctgtgaccggaggagccatgtcttaggaattttccatgtagggtacagcctgggtccctcttgagccatagacactctcagtaatctggccacctctctgagggtggcttaaaagggccctggtggcatgacccttctgtatcctgtccagtcactcagaggctggctgacccactcactacacagactgaatgttccacaagggagtctggaactgactcaatgtctggggtccgtgagaatgtgccaggtcatgaggtctgctaccagatggcatctgaggagttcaaatgaggagatggcacctgtcatctacacatccacaggcagtgctctctgagaggcagcttggcagggcatggaaccaactaaatgctcaaacccatctcactggactgcatgccctgggctggggagacaggccctcttcattgtgatggatggataaatgtcatggttagtttaacactaactttaaatgaagcttaattgattgcatcacatttacccaggaagccgttgttctggttactcttcttgacactccaagaagatgagattgtcatagaaatcagagtgtctatgtggcctgccctgaagggacaccatccccaacccctactccctgggccacacatatctgtgccagaaaggctatgcctaccttcctgtctccaagtacagactcggagttcttgtccacatcaccaccccaagctctagtgcctttccagataattcctctcctctgtccatcaccatggatcaagtctaacagtagaatgacactcataaccaactgggacagtcaagttctatcaggatccttgtgcaccacacgttccttccacttagatacaggcattctcacatgcctaattttctagccggagtttagaagatagatccccttacactatcaattcatcagtccagaccatgtttcccttgcagggacctcttgccgcgtgggcacagggtgacagcaagattcttcagatggacttaatgaccttggccctcaacaagagcaaatcagaatgctggacattttcctccccatgagagcttctacgtgtgaaaggcagggataccagatgctagagacacaatggaatagtaccaggtagatagctggctggagtagcactcgactggaccatgatactgacattgctacctcaaactacacaccagcaatagtcagtgcttcaggtattgattcctcagatcaattgacactgtgtcacatgcacttggcaggttcgatgtaacctcctgacccatgagtcacccaacctcgtgagccacctttggtcatttttgccacatgttggagatgaagcacaggctctagaacacagctcgagttccagtcctgccacaaggctccccgatggtgtgatccggagggagctacttcctctctttgcatctcacctaagatggagagaataacagtttcaacttgatggaggtgctttgaggaggggttgctaaacaaccatttatctggtttaaaaccaaattaggaagccaggtttggtagtatgagtctataaacccagttctggaatacaaagatgcttgtgtaggggtatatgcgtgaggctcattggtcagccacattagccgatacctgctctgggatcagtgaaagattctgtctcaaaataataaggtaaataccaggcatagtggttgcatgctgttggtctcagcacttagaaggcagaggcagcaagatttctatgagtttggggccagtttagtttacagagtgagtgagtttcagaccagccagggatacataatgacactctgcctcaaaaataaataaaaataaagtggaaatcaatagaacaggacacctgaagttgacttctggcctgtgtgtgtgtgtgtgtgtgtgtgtgtgtgtgtgtgtgtgtgtgtgtgaatnnnnnnnnnnnnnnnnnnnnnnnnnnnnnnnnnnnnnnnnnnnnnnnnnnnnnnnnnnnnnnnnnnnnnnnnnnnnnnnnnnnnnnnnnnnnnnnnnnnnacccctacatcatcatacacaagcccaaaccaaattagtgagtgagcatttctctttaatagacacaaatatgtatacattcaaagcatccagatgtcttttagtctatgtcccatggtgggcctaagagatgccaggtggatttaacatggccaagaatccctccaaatgatgctagattagtgtgccccttgttgggagtcacctctcattccggaaaaggataaagggagcacattgggctctgaggccaggacatcagcacacaggtactccaggcaggtaagcctgtgacagctagaagtgcaaggaagaggtgacagggaagagaagaccatacacagagcgcctaaaaaccatgcagagctgatgaaattgacccaagcaatgcactgctgaggctggcctgcccttttgggtctagggtgagacaatccccagctatcagtggtgatggcaatattgccccacactaatgaagaagacatgaatatctattttgtactcctatgtatgtacctaatgaaatcaaattattgcactgtgttatgttaacctaattaaaacctttgcctaggaactgcaggaattttgtagaagtacaacatattaaagttgttctaaagtgctgatttctgcccatttggtaaagcctctaccccttatcttgggtaggcaaatactcacaaaaagctttgttaaagaatgactcccatggccatctgacaaaggtcatactgtagatcttatttgttaaggaagaatttgtttttattactacctccacatgtttgtatgggttttttgtttggtttggtttggtttggtttggtttggttttgctacctataaaacatctaccagagtcaaatgcttgattctgcttttgctgaccctacaaacatgtttatggcagaaattccttttggaggatacaggactcagagattaccttcaggtggccacactgttatctaacctctaaaagctgtaagaaattatggcttgatgctttccaaagcattagcttgggtaccaacttgtgtgaaaacagagctctgtttctctggttgaatagttttctttgctggtgagaattcccgtgacataatttggaggccccagcaagattccagccacaccaaccctctgcactgaggaaacagcagctcagccacaccagaatgaaggatttccaagtgaagatgctaagcatgttctggcattcctctgagcaggactctgactcagtacttgactcttctgacatctgacccccatgactagactcactagatagagggggacaaatttgacagaaaaaaacttgcaggataaggtaaggcactgaagcccagagttctggtcaggcccactcttagggtagaagagaacttgttcaggttttataaaacatggtcacagtcccattgatgtttgttacctagaagacccactacattaaaaactttattctcatagagagtaatgttgtcagagggaaatgttatacttagctaacagtcagaagacatgtgttgccttatcatggggtgccctcactgcctgacatccaagtgttgcttgtacgtacacaggacatttgtattcccaagcctagtaatacaatagagagccatatagggctggatggcccctttcagatcctaggcttatcaaatcctagcctagcagggtacagctgacttttcctgcctcttgggaaggcccggctgattcccattccaggagagtgtatgaaagcattagaagagctgtccaaagttgtacctaggctgctggatttgggaatagcactgggagcagggaccggtattggaagatcagcatcctctgggatctaggataaacaggtggccacaaaagtgatgtaagacatggggcaggtagcccagtcgctagagacaataagggaccaggtagtctctcttgcagaaatactcctccagactagaagaggtttaaatttgctgaccaccaagaagggcagactcagtacttacaaatgaggaacattgttaccatgcaaaagggtctgggaaaataagaaatgtagtcaaacaaccgaagaaaagcagagcaagaggaagggaactattctgtgtgctaagaaaacaattattttaattgctacctacaaatgattgtatggttttcattgctacagagaaaacatctacctgaaacatttccttctgctcttgctgtgtaaaggtgtccaactatgacagacatttcttttggtaaacacgggacgcggagacaaccctgtcatctgacctctgaaaggtgtgaaaaattatgggatgctgctggacttttccaaagcactcgattggctccacccagtctttgtataaattaaagttctgcccctctggttgcatggttgtttctctgctggctggaactcctattggggggacgaggagaatgccaaggctttgaagcccatagaagaatcccatgggatcccaaaggactgaagacacaggagcaagcagatgagcaacagagggcaggtcagatggcctgtgactttggctcatcattccacccctgggctgctgaactgcacttgaccaagtgggctttcctcccagaggatgatgagacaaaaagccagtaaggaaaaagtcttctactaggctggccctggacatggctggtgtttgtcctgatactggtctctttctcagtagacttgtctggacaaggtaccagccaggagtgttggaaggccattcagaaaaacagactcattgaaaaagtctgtgctctggactctgtcccagttccaatactgaaggaggtgcaggctttacaaagcaccgccttgccactagagggggccttctcctcatgtctccactgacaacactcacagaagagcccgatttcagaggcttcaagacaatcttgctctgtgtccacataatgggacatatgtggtagatggtcaatacggatctgtttagagggattggctccacaaacaaccctttctttatataagccaggagccttccaccccaccgtggacttgataccattcacatattgttgatgcttccttctagaacagtggttctcaacctgtgggtcatgacccctggggcgcgagggggggggggagggttgaatgaccttttcacaggagtcaccaaagactatcagaaaatacagtattaacgttatgattcataactgtagcaaaactagttctgaagtagcaacaagaaatagttttatatggttgagagctaccacaatatgcggaacaatatgtattaaagagttgcagcattaggaaggttgagaaccactggtctaggacatggaggatcccgtggttctgctctccaaagagttcctgccccaaattctcacttatcaagattaaacatgaaagcgacagtgcctaatcagacctcttttccaaccatagcaggccttgggatctaggagagatggctggcagcctcaatttatcttctgtttctcccacaaagacaaccctagacggtgcaatgcagtttcctgttgatatcttagcttccccaacctatccatcaatggagatgctttctggttcttcccagcatgggtctggtggttgttgttgttgtttcagggatgcgtcattgtctcacaagtgtccctccagtttattccagtctccctctacagcactttggcaaaatgagaaagccatgatttttttgaaatgggcaaatcctttatcccacagttgcctgtccaggatgctctgcaccagccagagatcaaggtttagctgccctaggacccacctatgagggtgacactgcattagagcagacagcatggacggatgatgtggcatagtgtgatccacacagtgataggaacatggtcacaacatgagtataagccatctaggaaggcagaagtgatagacagtatccatgatcagtccatctggagccaactctaggagtaccaccaatgcgcccatggcataaacagtataaggtcagagacttagacacgtgtaaagaaggaacaacttgttaagaaaggaacaattccgtaaggtttttaaaaggacagattctaaacacagagcatttgagtaagtttttccagagagatagagggtgataggatcagtaattgaacccgggcatcgcattagagggcagccgtgggtggatcagatagaagacctttacatcaagctaagcaacttgaattgtctcctgtcaaagaggctcgtaaggctttaacagatggagcagcctcacatccacacaacttaccctgttcaaaagccataaactgccaaagctagagtgaaggtttagcaataattgtcatccacagtgggcatgtccaaagcaaagacagcacatttaaagctgcgtatgattcaggaagaaaaagacaacctaacagaaaaacaaggaagtgaagcaacagnnnnnnnnnnnnnnnnnnnnnnnnnnnnnnnnnnnnnnnnnnnnnnnnnnnnnnnnnnnnnnnnnnnnnnnnnnnnnnnnnnnnnnnnnnnnnnnnnnnntccaccacaacacacatacacacatacacacaaaccacacacactacacacacacaaaccacacatactacacacacacacaccacacacacacatacacacaaaccacacacatactacacacacacatgccacacacacaaaccacacacactacacacacacatgccacacacacacacatacacacaaaccacacacaccacacacacacagacactgatgttaatggaatgcaaatggcctccaaacataggaaaagtttcccagccaattaagcatttaacgattgaaatgacagtgatactatctctcatcagactgacaaaaggaaaagacgcaagaccagcactgacatggacttggtaggaaggtttatgcaaccattctggaaggcaatttggaaatttcttttaaagtctaacatgtgcctggtgtgagggagcattcggggtcccggcaggaatattcgccttgagttcaaggccagtttggattacttgagttctaagccagcccaacctatgtcagagacctgtcttaaaggaaattaaaactctgggtaaagcaggtgcacactcctttgctcccagcacttgagaggcagaggcaggtggatctctgtgagttcgaggccagcctggtctacagagtgagttataggatggacagggctacaagaatcatgtcttaaaacaacaacaaccaagaacagcaacaaaaatacccaaccaaacaaataaaattaaataaaataaatattcacatcactgggagaaacatcttcacaagagaagaaagacattcattgcaacactgtaacatcaagaatcaggaaaaactcagatctatcttcaagtagaagtcagtgggaaattaatactatactttttattttatcaagaacaaagaacactatggtattgttggggagagatggatcatcagttaaaagtactgcctgttcttctagaggtcttgagttcaattcccagcaaccacacagtggctcacaaccatttatactgatatttgatgccctcttctggcatgcaggtgtatattcagatagagtacatagagtatatatatgatataataattccttaaaacaaacaaaaaacaccatagtataatagcagctaagaaaaaacttagtaccatagagataactgaacagttgcaagcacttcctgctgctgtggaggaccaaggttctgtgccagcatctacatgacagttcacaacatctgcaactccagttccagggggtctggtgccctctgctgacgagtgcatgtgcgtggcatgcatgtggtacacaaacttgcatgcaagcaagaaacccacatacataaaaatcaataaacctttaaagaaaagaagaaccataactctctttgtatgagctaacatggacttattgttaagtagaaaatgagagagccccagaatgacacatatatagcaagacacattaaaatacacttaactaaacacagtgctgtttgttaaattttatatgagctcatagctatgcatagaaagctttagaaggggcttggaaatatacataaaaatggtaatggtggcagggactaaacatctatctaacaccatgatttccattagcagaatgtattttcatttcaataaacgtagagctgaatttgaagcccactcacacaccagctcccatgcagcactgtggccaatccctcatgaacagacagagcctgcctgaggcgctctcaggctggcgtgagcagggctccaacagagttgtggcatactcctgaaatacaggcacttgggaagctgaggcaggaggattttgagagttccaggccaacaaaagaagacaataacaacaaacttgctggctttccagtgggcagagtgagccgctgtggttggttagagaaggtctggaaacaggaagactgggaggccgtgtaccaggagaagaagcaagacccaggtagcaagtggtgtgtggggctctgtgaccaagctgggaacttgcctatagtttggtgcagtgcaatttggtgcagtgtgggtgtgcattggccagtgaggagggggcccagttgagaactgttgagcgccccagtcttggggaaggtggagagtctggtgcagtgtgcaaccttcctaacattgcttgtcctttaacacagtccctctcattgtggtgacccccaaccataaaactatcttagttgctactccatagctgtaattttgcaactgttatgaatctgcggtttttgacagtcattcaatttccccaaaggaggtgtgacccacaggttgagaaccactggtctgtggcaaatcttggagagggaaatgaacctcaagaagtcattgaattgaagtgcaaaagaaacctgagggctaaagtcacagtgatctggggccaggctttctatcagaatgcatgtgaggtatctgctactcaaaaggccgctcattggccaggccctttctctggaagctgtagagagcagatcagggcccacttactggtacagaagacactgtctttacccttctgtacctactccattgtccgagtctgggcattcaggatgggctggccaagggcagcaaggcagacacatagtcctctggcttccagccatcagacttttccgggaatggctgacgtgggccactctgttcttttgaatctgagcctatgtagcagtagaggcctaattaattaagtaatgctgaagccttgggactctcccaaaggcagcacacaggggaggggttggtgaggcctgagaacgttctaccccacccccatccccagtgctggaatccagaggctcctgagtgtcattggaactaaagcctgcacttaagtgcttccacagagacaaagaaatcataaatcaagagcgggcaaccccgcccacgcactgctaaccaccacgccaacctgcttctccagacacccaggcagtttgcagctcagaaatgaagccagaataggctgatctctccctccacagcagcacctacagacccatgaccccaagaaggcactgctgcagaatggctgctcccaccctctctccagactcccccaccccagaacttcacactctctacccactccccacagcactgattcataatggagcaggtttttggtttatcagactaaggccacggtgtggccactgaataaaatgagaagaaaggttgtcatccaaaacccaccacccactctgaagctgttaggtgataatgaagctcactgagtacccagcattgagccctgagaccatgtggtgagttccttgttgtgtgctggctggccctgtggccaggagatgaacatggaagccagatctgaccaggatgaattacttcactacggtgtccccaactatagaagggtaatatgaatgctgataatgtgattaaatgagttactacatgcttatcacactgcctgacacatttctagcttttttttaatagatctaataaagaaacacctcctttactcaatcatcttatatgtatcctgtagtaacaatttctacattctgaatgaaaaggagaaaaacatgcttctatttttcctccaagactggataggaaatttcctcttgcatatgagttatgctcaaatacagaagtctctggaaaggagtttgccaagcaccagtatgagggaaaagccacaggcacaaaaacacggcaaggactggccggcccctggaaggcttccagcagcaaaccgtccagcaccacggacagttccagcgagccactaggcctggaagggaagttgtccttctggcctggcacatctgggagagggagccttttgctgaagggggtctgtcttcccctgactgtgacccctgtatccttcagatgtaaaagctctgccttcttatttgggagctaaagacctggaagaatccagcccattgccttcctcactccagtttttatgcctcttgcccttaccctgccaaggtgtgccacactgcagatggagtgatagaggcataatgaaacacaaagaaaagggaggtggcatgaagaccatgaagcaggtcttaacagcctggaaccagatgtgccagggcataagaacaacttccctgtggggggtgtgatgggggcagatagcatctttgctgtaccaggattgaggaaggatgaagtaagagtatacccatggccctggcacagaacaagtgagtccgcatcttgtcatagaggaatggaggaggcgagagttgggtgtgagtcccaaaatgaactggcttcattctcaggaacagctaaggattattatgtgggctggagagccaagagacgaggtctgcagcttgctaggactgggaagtttattttttggaagattctactgtctgttaaccactagagagaaaactgctgcctcccgtgtcatcctgcctcctgattttactcagacggcgcgacaatatatgaataaataatcgttaccatgtagggtgtggaatacctctttaaaaaccatcagtgtagcttttgtagaaaagtcagaggaacccagagtattcttaaactagagtgtctggagagccaagcaggtgacagagtacatggagcaagctgagggaaagcgagtctctggagtatgtgctatgaacaaaggcagtgggataatatttaaagtcgttttgctgcactttcagcagtgtgaattttggtaacctcttgatgaacagaggccaagtgggccagaggtagggcaactgtgacttgcccaacattatccagagccacagctgtcctcatatttaggcttcttccctcattttaagggcagctgggccatcacagggcatgtgactgggcagctctctacttaggtgagtctcctcctttcaggagtacctgtgtacggggttgagaggttgggctagaccacttgagtgctgccttctctccctgactctggtctctgtcacatcatcttgcagctggcataagaagagaagccaactttccagctctttctgtatcttctaccagctcggacagagaccaggctcacaatgccttcccactcgagggataagccagagagtcaggatggccctggtgtctgtctgctcttcacaagaccctccactgtgacatgaacacagggcagagcatgtcacagcaacaatggcaaatactgatgcttctcatcatgcgtgtaccacaccctaagctgtaggtactccattttacagataaataaagggacagtgggggcagaaggagaaacaacgtctcccttggcactgttatctagtaagtggtagctctggaagccatcctatttgtctgcctctggagcccagatcacgatgtctccttcccgggtgggaagcccagtggaagaagctaaatccgaggctagcttgggatctgaaggctcctgtgattccgcaagacagggaaagtccaatctcaacgtcaccaccacctccaatctcagctgactggcatcctctctccttccagtctgtggactggaactcgggcctcacgtgccatctagggtcaaaactcttctgaggacacactgggcccaacgcataggctgatctgttcagcctgtcgcctgcaaatcaggacgctcagcgtgtgcagccctcccggaaggaaggtgagccttcctaagcctctactgacagcaaagctgcagaggccctgctgcgtgagacccagaagcttccacgccacttgtgagccccactcaagacttggaggcggccggggtgggggtggggtgaggaaatgcagaaaagtgggcggaggctctcaagagcagagggagggtaaggtctggagagaagagggccagggaggagttagaaagaggagtgggagagtagaaaggaagggaaaataggcggagctggggggggggggggggagagacccgcgcccggaaagccgaaaaggagaggccaggtagggggaggtcaaaaagtgttagttttgacttccaggaccctgggtgcaaagaacgactcctcctctcaatactcaaacccttaaagactggaattagctgctaagactttctgcctaagggcaggtgggtcggaaccagaccctgaaggctctgtaccttccccctcccttcccggaggaggggatgagacgggctgggggcgggattgaggaagggggttgcttgcgctgtgcctctgggtcccggctgcgtgttccagctgcgagaacagatggaggcagcgcggctcacctcgggggctccgtgcccgctgtgcgccgaagtccaggctgaggaggaggtctagagcccccggctctcccgtctcccaccaggctgcggggaaccggctgccgcacccctcctcccaattgggggaacctcacccctataggtcccagaactgggggaaacatagggccggttccttccactgctcacccatccccaggggcttgtctaggactacagctcgccaagatccccttccccttgctcccaacctggaaacatctcggaagcggacccctgcccggacgcgccccgcccccggcccccggcccccgccccgacgacgtcctattagcatgagcgacgccagtggcccgggcaccactcgggggccgagactcaccgcgtcatagccccaagtggagggagaaaaaaaaaaaaaaagagaggcggcggtggaggaagaggcaagagcggacgcgcggggagggctggagagacggcgggcggcggcagcatgcccctgggcgggtgcacacggcctctctgcgcggcaggggctgctcctgctctctctgggcaccgcgcgtccagtctcccgcctcagcccctcggcttgccggcctccgcggttgcatccgaaacagcggcaactggtccctggagcatctaagagcagcggcgccgcgcgggacaatccttgatttttttttttttttctcctgagctcggggatatgaaccccacagccacctgaagcacagggggcgctacgcggctaggaccgcgcccccgaagtaccgtaccctagcctctgcactgcgggacgccgacacccgactccggtggaggcatcttaggaagagcagcgggtaggggcatggaacccaccgcgccaaccggtcaggcccgggcggcggccaccaagctgtcggaagcagtgggagccgcgctacaagagccccagaggcagcggcgcctggtgctggtcatcgtgtgcgttgcactgttactggacaacatgttgtacatggtcatcgtgcccattgttcccgactatatcgctcacatgcgcgggggcagcgagagccctaccctgatctctgaggtgtgggaacccaccctgccgccgcccactctggctaatgccagcgcctacttggccaacacctcggcgtccccgacggctgccgggtcggctcggtcaatcctgcggcctcgctaccccacagaaagtgaagatgtgaagataggcgtgctatttgcctccaaggccatcctgcagcttctggtgaaccccttaagcgggcctttcattgatcgcatgagctacgacgtgccgctgcttattggcctgggcgtcatgttcgcctccacagtcatgtttgcctttgcagaagactatgccacgctcttcgctgcgcgcagtctacaaggcctgggctcagccttcgcggacacgtctggcattgccatgatcgccgacaagtatcccgaggagcctgagcgcagtcgtgctctgggcgtggcgctagccttcatcagctttggaagcctagtggcgccaccgtttgggggcatcctctacgagttcgcgggcaagcgtgtaccctttctagtgctcgccgccgtgtcgctcttcgacgcactcctactcctggcggtggctaagcctttctcagctgcggctcgggcgcgggccaacctgcccgtgggcacacctatccatcgcctcatgctagacccttacatcgctgttgtagccggagcgctcacaacttgtaacattccccttgcgtttctcgagcccaccatagccacgtggatgaagcacacaatggcggcatccgagtgggagatgggcatggtttggctgccggctttcgtgccacacgtgttaggcgtctatctcaccgtgcgtctagcggcgcgctatccacacctgcagtggctgtatggcgctctcgggctagcggtaatcggagtgagctcttgcgtcgtacctgcctgccgatccttcgcgcccttagtggtctcgctctgcggcctctgcttcggcatcgcgttggtggacacggcgctcctacccacgctcgcctttctggtggacgtgcgccacgtatcagtctatggcagtgtctatgccatagctgacatctcctattctgtggcctacgctctcgggcccatagtagcaggccatatcgttcactcacttggctttgagcagctcagccttggcatgggcctggccaacctgctctacgcaccggtcctattgctcttgcgtaatgtgggcctccttacacgctcgcgttccgagcgcgatgtgctgcttgatgaaccgccgcagggtctgtacgacgcgatgcgcctgcgtgaggtgcagggcaaggacggcggtgaaccttgtagcccgcctggcccttttgatggctgtgaggacgactacaactactactcccgcagctagcagacccgcttctcctccaggccacctaccctccccatttaggtcaagatggtcattcttcaagagcgctggccaactttggcttggggcccacctcctctaatgagtaccctagcccgtcccccgccctgaattcctttgctggaatcccttctccgtgacccctcccagtctaaccccctctccaaacacactcgtattcattgagggaatggatcagggaggcattgggctcttggcagaggtgtaccggtgatcaccaaccacctactgagagcccccaagtacagtcatgcatctgtttgtccttcctgcggatctttccagtgccaaacttggtctactacaccctggtgcctccggcctgaattaataaaccatatctgtctgaggaggccaagtctctttactgatgaggggtgggcagtgtgacacaaaacctaagcacactggggttcacatgttcaatgcagacctgaggaggggtggaagctctgaagatcctttactgcctgggaaaaggaaacaaccccaatccccccccccccccacacacacacacacacgatagtctctcctttccaagcccagtgtagcacctggaggttccacccgagggaacctgaggatctgcctggcctcggaggacagctggcaccaagggctttcccacacagtgggacctcgcctcatcttgtcaagagaggagcacaagggagctggtttctgcagagaagaggaggtagtccccattttatagggtctcggcctggtgacagtgttcattaaggatccaggctctatcatctgaggaatgagaaaacagttacccatggatctgccttttctcagtcatgaaagttggaatggaaaacggaaggaagattgatgtaggaactgatgctaatccctagtccaccctgtcctgaatataagtggccgctcagggttatccggggtgggggtgagggtgggggctcccgcccttgatttcctaccatggaggcccaggctgaaggcagtacactcattcctgaatcctgatgcctgcacatgggactctttgatttcagggtgaagaggcagttggggtagggtaacctgtgtatgcagggggaaggtctgcagttggtgtgtgtgtgtgtccttgtctgagtcttcttgtgtaagaggggcttgtgtctgtctctctgtgtgtctgtctgtccttgtttgagtctttttgtgtgagaggtgtggtggtagggggagtacttgtctgtctgcctgcctgtctgcctgtctatccttgactgagtctgtttgtgtaagatgggagagtactttgcctgggaggagtgtctgtgggcctctggttgaggctttaaacaactcccacttaccatcagagtggaccaagtctgtggtctcttgtctgctcctcccttcccaaagaacctgcaggaattggatggtaaaagaaaacaagggaggtcttactgtggccaaccaactccttaatttttaatattttaaaggggtgcagtaagatttcagccttgtgaggagccggccataacttcgtatagcatacattatacgaagttatgtttaaacaccctgcaggaggggcccacaagcttgatatcgaattcatatgtctagattagataaaagtaaagtgattaacagcgcattagagctgcttaatgaggtcggaatcgaaggtttaacaacccgtaaactcgcccagaagctaggtgtagagcagcctacattgtattggcatgtaaaaaataagcgggctttgctcgacgccttagccattgagatgttagataggcaccatactcacttttgccctttagaaggggaaagctggcaagattttttacgtaataacgctaaaagttttagatgtgctttactaagtcatcgcgatggagcaaaagtacatttaggtacacggcctacagaaaaacagtatgaaactctcgaaaatcaattagcctttttatgccaacaaggtttttcactagagaatgcattatatgcactcagcgctgtggggcattttactttaggttgcgtattggaagatcaagagcatcaagtcgctaaagaagaaagggaaacacctactactgatagtatgccgccattattacgacaagctatcgaattatttgatcaccaaggtgcagagccagccttcttattcggccttgaattgatcatatgcggattagaaaaacaacttaaatgtgaaagtgggtccgcgtacagccgcgcgcgtacgaaaaacaattacgggtctaccatcgagggcctgctcgatctcccggacgacgacgcccccgaagaggcggggctggcggctccgcgcctgtcctttctccccgcgggacacacgcgcagactgtcgacggcccccccgaccgatgtcagcctgggggacgagctccacttagacggcgaggacgtggcgatggcgcatgccgacgcgctagacgatttcgatctggacatgttgggggacggggattccccgggtccgggatttaccccccacgactccgccccctacggcgctctggatatggccgacttcgagtttgagcagatgtttaccgatgcccttggaattgacgagtacggtgggtagggggcgcgaggatccactagtacgcgatcgctaataacttcgtatagcatacattatacgaagttatatttaaatacctcgagaggcggccgcatttaaatcccgggatccaccggtcgccaccatggtgagcaagggcgaggagctgttcaccggggtggtgcccatcctggtcgagctggacggcgacgtaaacggccacaagttcagcgtgtccggcgagggcgagggcgatgccacctacggcaagctgaccctgaagttcatctgcaccaccggcaagctgcccgtgccctggcccaccctcgtgaccaccctgacctacggcgtgcagtgcttcagccgctaccccgaccacatgaagcagcacgacttcttcaagtccgccatgcccgaaggctacgtccaggagcgcaccatcttcttcaaggacgacggcaactacaagacccgcgccgaggtgaagttcgagggcgacaccctggtgaaccgcatcgagctgaagggcatcgacttcaaggaggacggcaacatcctggggcacaagctggagtacaactacaacagccacaacgtctatatcatggccgacaagcagaagaacggcatcaaggtgaacttcaagatccgccacaacatcgaggacggcagcgtgcagctcgccgaccactaccagcagaacacccccatcggcgacggccccgtgctgctgcccgacaaccactacctgagcacccagtccgccctgagcaaagaccccaacgagaagcgcgatcacatggtcctgctggagttcgtgaccgccgccgggatcactctcggcatggacgagctgtacaagtaaagcggccctagagctcgctgatcagcctcgactgtgccttctagttgccagccatctgttgtttgcccctcccccgtgccttccttgaccctggaaggtgccactcccactgtcctttcctaataaaatgaggaaattgcatcgcattgtctgagtaggtgtcattctattctggggggtggggtggggcaggacagcaagggggaggattgggaagacaatagcaggcatgctggggatgcggtgggctctatggcttctgaggcggaaagaaccagctggggctcgacgactaggttaattaaggccggccaggcctctagtgcggtaaatagcaataaattggccttttttatcggcaagctcttttaggtttttcgcatgtattgcgatatgcataaaccagccattgagtaagtttttaagcacatcatcatcataagctttaagttggttctcttggatcaatttgctgacaatggcgtttaccttaccagtaatgtattcaaggctaattttttcaagttcattccaaccaatgataggcatcacttcttggatagggataaggtttttattattatcaataatataatcaagataatgttcaaatatactttctaaggcagaccaaccatttgttaaatcagtttttgttgtgatgtaggcatcaatcataattaattgctgcttataacaggcactgagtaattgttttttatttttaaagtgatgataaaaggcacctttggtcaccaacgcttttcccgagatcctctacgccggacgcatcgtggccggcatcaccggcgccacaggtgcggttgctggcgcctatatcgccgacatcaccgatggggaagatcgggctcgccacttcgggctcatgagcgcttgtttcggcgtgggtatggtggcaggccccgtggccgggggactgttgggcgccatctccttgctgcctcgcgcgtttcggtgatgacggtgaaaacctctgacacatgcagctcccggagacggtcacagcttgtctgtaagcggatgccgggagcagacaagcccgtcagggcgcgtcagcgggtgttggcgggtgtcggggcgcagccatgacccagtcacgtagcgatagcggagtgtatactggcttaactatgcggcatcagagcagattgtactgagagtgcaccataaatcaatctaaagtatatatgagtaaacttggtctgacagttaccaatgcttaatcagtgaggcacctatctcagcgatctgtctatttcgttcatccatagttgcctgactccccgtcgtgtagataactacgatacgggagggcttaccatctggccccagtgctgcaatgataccgcgagacccacgctcaccggctccagatttatcagcaataaaccagccagccggaagggccgagcgcagaagtggtcctgcaactttatccgcctccatccagtctattaattgttgccgggaagctagagtaagtagttcgccagttaatagtttgcgcaacgttgttgccattgctgcaggcatcgtggtgtcacgctcgtcgtttggtatggcttcattcagctccggttcccaacgatcaaggcgagttacatgatcccccatgttgtgcaaaaaagcggttagctccttcggtcctccgatcgttgtcagaagtaagttggccgcagtgttatcactcatggttatggcagcactgcataattctcttactgtcatgccatccgtaagatgcttttctgtgactggtgagtactcaaccaagtcattctgagaatagtgtatgcggcgaccgagttgctcttgcccggcgtcaatacgggataataccgcgccacatagcagaactttaaaagtgctcatcattggaaaacgttcttcggggcgaaaactctcaaggatcttaccgctgttgagatccagttcgatgtaacccactcgtgcacccaactgatcttcagcatcttttactttcaccagcgtttctgggtgagcaaaaacaggaaggcaaaatgccgcaaaaaagggaataagggcgacacggaaatgttgaatactcatactcttcctttttcaatattattgaagcatttatcagggttattgtctcatgagcggatacatatttgaatgtatttagaaaaataaacaaataggggttccgcgcacatttccccgaaaagtgccacctgacgtctaagaaaccattattatcatgacattaacctataaaaataggcgtatcacgaggccctttcgtcttcaagaattcccatgtcagccgttaagtgttcctgtgtcactcaaaattgctttgagaggctctaagggcttctcagtgcgttacatccctggcttgttgtccacaaccgttaaaccttaaaagctttaaaagccttatatattcttttttttcttataaaacttaaaaccttagaggctatttaagttgctgatttatattaattttattgttcaaacatgagagcttagtacgtgaaacatgagagcttagtacgttagccatgagagcttagtacgttagccatgagggtttagttcgttaaacatgagagcttagtacgttaaacatgagagcttagtacgtgaaacatgagagcttagtacgtactatcaacaggttgaactgctgaaacatgagagcttagtacgttagccatgagagcttagtacgttagccatgagggtttagttcgttaaacatgagagcttagtacgttaaacatgagagcttagtacgtgaaacatgagagcttagtacgtactatcaacaggttgaactgctgatcttcagatcctctacgccggacgcatcgtggccggatcgcggcccggcgcggtcgacgatcatcctgttacggaatattacattgcaacatttacgcgcaaaaactaatccgcattcttattgcggattagttttttcttagctaatagcacaattttcatactattttttggcattctggatgtctgaaagaagattttgtgccaggtcgataaagtttccatcagaaacaaaatttccgtttagttaatttaaatataaggaaatcatataaatagattaaaattgctgtaaatatcatcacgtctctatggaaatatgacggtgttcacaaagttccttaaattttacttttggttacatattttttctttttgaaaccaaatctttatctttgtagcactttcacggtagcgaaacgttagtttgaatggaaagatgcctgcagacacataaagacaccaaactctcatcaatagttccgtaaatttttattgacagaacttattgacggcagtggcaggtgtcataaaaaaaaccatgagggtaataaatctagaggatcgatcctttttaacccatcacatatacctgccgttcactattatttagtgaaatgagatattatgatattttctgaattgtgattaaaaaggcaactttatgcccatgcaacagaaactataaaaaatacagagaatgaaaagaaacagatagattttttagttctttaggcccgtagtctgcaaatccttttatgattttctatcaaacaaaagaggaaaatagaccagttgcaatccaaacgagagtctaatagaatgaggtcgaaaagtaaatcgcgcgggtttgttactgataaagcaggcaagacctaaaatgtgtaaagggcaaagtgtatactttggcgtcaccccttacatattttaggtctttttttattgtgcgtaactaacttgccatcttcaaacaggagggccggaagaagcagaccgctaacacagtacataaaaaaggagacatgaacgatgaacatcaaaaagtttgcaaaacaagcaacagtattaacctttactaccgcactgctggcaggaggcgcaactcaagcgtttgcgaaagaaacgaaccaaaagccatataaggaaacatacggcatttcccatattacacgccatgatatgctgcaaatccctgaacagcaaaaaaatgaaaaatatcaagttcctgaattcgattcgtccacaattaaaaatatctcttctgcaaaaggcctggacgtttgggacagctggccattacaaaacgctgacggcactgtcgcaaactatcacggctaccacatcgtctttgcattagccggagatcctaaaaatgcggatgacacatcgatttacatgttctatcaaaaagtcggcgaaacttctattgacagctggaaaaacgctggccgcgtctttaaagacagcgacaaattcgatgcaaatgattctatcctaaaagaccaaacacaagaatggtcaggttcagccacatttacatctgacggaaaaatccgtttattctacactgatttctccggtaaacattacggcaaacaaacactgacaactgcacaagttaacgtatcagcatcagacagctctttgaacatcaacggtgtagaggattataaatcaatctttgacggtgacggaaaaacgtatcaaaatgtacagcagttcatcgatgaaggcaactacagctcaggcgacaaccatacgctgagagatcctcactacgtagaagataaaggccacaaatacttagtatttgaagcaaacactggaactgaagatggctaccaaggcgaagaatctttatttaacaaagcatactatggcaaaagcacatcattcttccgtcaagaaagtcaaaaacttctgcaaagcgataaaaaacgcacggctgagttagcaaacggcgctctcggtatgattgagctaaacgatgattacacactgaaaaaagtgatgaaaccgctgattgcatctaacacagtaacagatgaaattgaacgcgcgaacgtctttaaaatgaacggcaaatggtatctgttcactgactcccgcggatcaaaaatgacgattgacggcattacgtctaacgatatttacatgcttggttatgtttctaattctttaactggcccatacaagccgctgaacaaaactggccttgtgttaaaaatggatcttgatcctaacgatgtaacctttacttactcacacttcgctgtacctcaagcgaaaggaaacaatgtcgtgattacaagctatatgacaaacagaggattctacgcagacaaacaatcaacgtttgcgccaagcttcctgctgaacatcaaaggcaagaaaacatctgttgtcaaagacagcatccttgaacaaggacaattaacagttaacaaataaaaacgcaaaagaaaatgccgatgggggatcctgtcggcaccgtctggtttgcttttgccactgcccgcggtgaaggcattacccggcgggaatgcttcagcggcgaccgtgatgcggtgcgtcgtcaggctactgcgtatgcattgcagaccttgtggcaacaatttctacaaaacacttgatactgtatgagcatacagtataattgcttcaacagaacatattgactatccggtattacccggcatgacaggagtaaaaatggctatcgacgaaaacaaacagaaagcgttggcggcagcactgggccagattgagaaacaatttggtaaaggctccatcatgcgcctgggtgaagaccgttccatggatgtggaaaccatctctaccggttcgctttcactggatatcgcgcttggggcaggtggtctgccgatgggccgtatcgtcgaaatctacggaccggaatcttccggtaaaaccacgctgacgctgcaggtgatcgccgcagcgcagggtgaaggtaaaacctgtgcgtttatcgatgctgaacacgcgctggacccaatcttacgcacgtaaactgggcgtcgatatcgacaacctgctgtgctcccagccggacaccggcgagcaggcactggaaatctgtgacgccctggcgcgttctggcgcagtagacgttatcgtcgttgactccgtggcggcactgacgccgaaagcggaaatcgaaggcgaaatcggcgactctcacatgggccttgcggcacgtatgatgagccaggcgatgcgtaagctggcgggtaacctgaagcagtccaacacgctgctgatcttcatcaaccagatccgtatgaaaattggtgtgatgttcggtaacccggaaaccactaccggtggtaacgcgctgaaattctacgcctctgttcgtctcgacatccgtcgtatcggcgcggtgaaagagggcgaaaacgtggtgggtagcgaaacccgcgtgaaagtggtgaagaacaaaatcgctgcgccgtttaaacaggctgaattccagatcctctacggcgaaggtatcaacttctacggcgaactggttgacctgggcgtaaaagagaagctgatcgagaaagcaggcgcgtggtacagctacaaaggtgagaagatcggtcagggtaaagcgaatgcgactgcctggctgaaagataacccggaaaccgcgaaagagatcgagaagaaagtacgtgagttgctgctgagcaacccgaactcaacgccggatttctctgtagatgatagcgaaggcgtagcagaaactaacgaagatttttaatcgtcttgtttgatacnnaagggtcgcatctgcggcccttttgcttttttaagttgtaaggatatgccatgacagaatttcatcccgtcggatcgatccactagaggcgcgcccttgatttcctaccatggaggcccaggctgaaggcagtacactcattcctgaatcctgatgcctgcacatgggactctttgatttcagggtgaagaggcagttggggtagggtaacctgtgtatgcagggggaaggtctgcagttggtgtgtgtgtgtgtccttgtctgagtcttcttgtgtaagaggggcttgtgtctgtctctctgtgtgtctgtctgtccttgtttgagtctttttgtgtgagaggtgtggtggtagggggagtacttgtctgtctgcctgcctgtctgcctgtctatccttgactgagtctgtttgtgtaagatgggagagtactttgcctgggaggagtgtctgtgggcctctggttgaggctttaaacaactcccacttaccatcagagtggaccaagtctgtggtctcttgtctgctcctcccttcccaaagaacctgcaggaattggatggtaaaagaaaacaagggaggtcttactgtggccaaccaactccttaatttttaatattttaaaggggtgcagtaagatttcagccttgtgaggaggggcaaaatttcttctgactcaagcactccccagggttctgcataagcagctgcccaggagccggtgcggatgggggagtatggggactggggtggggggcaggctggggtggggcggtggggaggcaatgttctgtgcccctttccaaggcctaagtctgatgccagtgcaggaactcatccgggaagctgtcctagacaggttttgagggcagaaaacagggaaacgcagggcagagtgtggggtagggggagcagtggactgtgaggaagagaggcagggaaggaaaagggggagggaaaaaagagaagagggggagggaggagggaggggagnnnnnnnnnnnnnnnnnnnnnnnnnnnnnnnnnnnnnnnnnnnnnnnnnnnnnnnnnnnnnnnnnnnnnnnnnnnnnnnnnnnnnnnnnnnnnnnnnnnnggctcacgcagccgcctccagccttgcttggtgtggaacagtgccggttcggtgcgtaacagcccaggagagcaggtgagaagggctgggcagcagtgcgctggcgctgaagagcccgcggacccaggcgttgtccctgggggctgggggggggggggagggtggcggggggaaggtgtgttcctctccggaggagctgtccaccgagggacagcttcccaggcccagagattccgggacgctcagagtctacagcgttccaggcaccagtagtcgtcggggtacatctaggagactgcagggattctgggctgggagggcttgattatcagggcttgggacttcccttatcttttcccatctttacttttactttgcctgacatctgccaatcccaaggtctgtggttttgtcgtgttgtaccgggggcgttagtaatatcgctgggcctcagtttcctccagccattcttgagaaggtggggagtgctggcgttaagtgccacatctgcgagagagtgacagcactgagagcctgggaaaccagaacagactggtgttggaccttcagggcagagcagaggacccccaagtgcccccacaagccaggccaatagaagcagaaatgggagagtaccaaaccgcagaaagacaaatacattcaaattctctaagcctggatcaagaggcttaggaggaaggagctggggtgtgtggggacagtggaataccgatcaggatgtcagatggcagggtccactctcctctccgttaagggctggctagtgtttttcccttcccacttctgagatggcccaaaaggagaattaggtgcataatcggtacagccttcattaacttgaccttgccttggttgacctcacaaagtaatcaacagaacacccacatactcatcctgccatttctaggtacagtggtctctaggactattgtgctgggagtgcactgtacacggcctttctatcctctctgttcagtgggaccaggcatgcaccaactcttctagtcttaggtctgcttcttcctcctttctggatggtctctcccccgaaccaagtgagccttatgccagcacctggctgctgctgctgctgctgctgctgctgctggtggtggtggtggtggtggtggtggtggtggtggtggtggtggtggcccaacaggttcaatgtcagctttaggctcttgagggctaataaagggaggttggttgaaatcttgactgtacatgtatgcaggttttggtttagtggggcagagggtgtatcctacaaaactggcctgtgtccttagcttagcttatttctagtgcaccttccaaattaatctgcctttcctaaggctgtcaggagactctagaggccctgactacctgctccccagaaggtatcatgcccttccgtagttccctcatacccaaccttggagcctgctgcccatagactacccaagttaacactctgctaacagacccagagtcctcaagaagccccgaatatcacccagagtacagggccttagaatacttgtgggcattcaagcacactctcattatacatacacatacacacacagggttggggagctttctgaactcacgtgccctctactctatacctgacccaagccaggcatctgagagggaaatctgaacccagcagatatagttttgcacttgagagctacagacttgggggaaaagttgatgttggggagagattgatattgagttccaggcaaaccaaggtgctctagtgctctgatcccagaaatctgggagtgtgcaaccagcccagctcctcccaatgcatcctggaatgctcagctagccttgggtcatagcagcttcatggaagcaggtctttgctggtggctcaaggcaggacccaatctctccctctggattcagagagtacactgtgggcaggaacacagggctgaggtctgagatggcagtcatagaggcgcagagttccctacacactactgtcagtggtctccttgtggagtgggagtaaggctatgggattcattcaggctctgtgtgatgctgagtctcctctgttcccaggtcggcagctctgctactctggattaagaatcgctaggatgcctatcctggaaaaggtccccccaaagatgcctgtacaagcttctagctgtgaggaggtgctggtgagtaacctttcgagccatgtgtcttagccctgatctcttctctcacatagtcttattcccaggacagtcctgagtggcaccggccttcaattgttccccagctctgtattctcctgggcagaaagtcagaatgtggccctgccctgtctgattgggtctcgaagtccagaagccttcatactgaagtcttagggcaaaaacccccaactctggttccagtagtcccaatgggctaaactcagctgtccatatatcaattaaagaggcaatatgttaaaaaggcagagaaaagagattaatcaattgacacattgggaaaatggtcaggtaaagagatccagtgattctaagtctatcctcaaggcatggtcataaactggatgttttagaggaacaatcaggatatatgaatatatactgatatctcataatacatacatacatacatacatacatacatgaaatatgtgcaattaagcagtcatgattaagacttaatatgtggtctggatgattgttctctcagctaagtggccagaagttggtactgtgaccatttgggggaggcagtttggttgccagtgttttcctggtccagaaggaagcttccttattgtgtataattgctctgctttgaaggattgtctgttctgtaaggcttccgactgcactgttttgggagcgcaagataattgatgtttagaacaaggtctggaaaggtttaggagtgttcagttgatctggaactaagcactggagaatctgtgaaaggtagttaagttcctcttggtttggtttggtttggtttggtttggtttggtttggtttggtttggtttggtttgctttgctttgctttgctttgctttgttttgttttgttttgttttgttttgtttttgaggcaggatttttctgtgtagccctggctatcctggatcttgctctgtaggtctggctggcctcgaactctcagagaaacccctgcctttgtctcctagagtgctgtgattaaaggcatgagccattaccaccaagctcagttaagttctttgtactttcagccatgtggagggggtacttagatagttgttgctatctctgttgttttgtttttaaaggcagatacctcttgagtgcctatgcctacatatagaattggtcaggtgtctcacctaaagtaaagggcacatatgcaaactgaaggcagagtgccaggctttcatccatccttgattaccttgtgagccaagtgaggcaggtgtcaatgctttgggggtaaaatcagtccctgactgccagctatagccttagagtgctggggaatgcaggtaaccacacttcttactcacaccagtcaagccctttctccctcacctcccccaacctcactgtaccccaaattccacttcagatggctttaagcccaacatgcttgcctaggcaaggctgaacccccttcccaagccctggcacattccagaagctccagctgctgccatgcttcagtccaggaacatccaaacatcatcttttccactggtttagaacaacactgccctccctgggcaggcagcctccctcctgctccatctagccttccagatagagcagcgcatctcagttcaagttcctgcatgtgctggcccctctaccacacccttcccacccctccctggtcctgtgagaacttcctgtcttctgcccttgttccttacattgtcccagcctctatagctgacccatgcctctgctgccaccatccatggcatatccctctcctctcctgtcatgagatgtggctttttggatggcagactctttctctccactatctctaagtccagtccatggcctggctcatttaagccacccagaaatttgcacagactgcagaatcccaggtcttagatccacgagagtaagagaaggaaccaagtctggagctgagatgcctaaactgagatttgcccgtcttgcccaccacccaggctgtgccacagcacaagtggaagctcaggggtctaaccaagcctgtcaccactcttggccagaccactacctgggctatgccttctagagatacctgcctgtcccagccaccctgacccccataaatagaagaagaggagccagaatggctaggaggagtcagcctggttttcatggagtgggttaaacaacacgggacaccgtccagacccgtccttgtatttgcattgcctcccagagcagcagcaccagagtttgctgctgacactccacctccagtcagagtaagtgagctccagggacaggaccagacaggtggggacttattagtctatcagttctgagcctcaggagaagacaggtgcttttggaagcccatcagggtagggtgaacccttggctacccaagagaaaccattcaccactttacagaaaaaaagcccctggaggagggcaccctgctgtacgccaactgcgtacaatttaacaacggcatgaaaaaaaaacctcacttctctattatcaggggttgagagagggaaacaggagggaaaagcagaaaggctgtgaggaagaggagaggagaaccgcagaaaaaggaggggacatgagctgggggtgtagctcagcagcaagttgtctagcatgggacaggagaggggagaggaggggagcagaagaaaggggagggaaaagggattgatggggagggaagagggaacaggggaggggaagagaggaaatacagtgagtaaaaatactgtgtgacctgggattagtctctctactctgtgggtctcagtttccccatctgtaatggcaaaagtccctgccctggctatgtgacacactgaagacaagcatagaaggtcccgggtcaaccatggttaatcagctggaacaggcagtgcccatgtgggggttcccagtggggtttccttcctgactctcacctcacatggagcccagagaccacaagcttcttctgaggagtccctttggagggataaggccagttaaccaaacgtaatatatgtttgttggagccaattatttttttcttattttcttggggtctttcaggtaggaagagttgttgtatcctctggatgaacaagactggagcttgagagagatctgggcaggaaagacttgcactgtgccttacctgactctagccccctcatggaaccaatcctttgcctgggtttcatacctggaagcatttgaaacaagaggcacagggcagaaatagccactgccccagggagcctttccaggaagctggtcatgtctccacccatctcatgggtcatgtcttaacccatctgactctctctgtaagagcaacattttccagtccagctgggaggagttcttatgtggagagtgaccagcagccagcagtgccgccaatgatctttcatcccagacccatcctttatgggctgttagcacattcacatctgtcatcccttccatcctgtgagagaatcatttttcatagaagaactgggcccttgcagagggagagactttcccaaggacacacgcctgatctctagcaaggtcagggtgtgaagcctggtctgtctggtgccaacagcagggtcagggtgtgagtccaggcctatcctctgcattttgtgctttcctgagacctacagacagtatggcggcagggacgaaaacaggaggacccttcatttataattctgctgagctaactaagcacagtaaacaggtccaagaatggggaatgaggatggggccgaaggagacatgttctggcatcaatcaactcaaggaaaagtatggactgtattaaaggaaagaaatgagagcccatcaaccctcttttccaggacttacctaagttgccagtgcccccactgcagcaaaccctggccacctaccttcagtgcatgcaacacctggtacctgaagagcagttcaggaagagccaggccattgtgaagcggtttggggcccctggtggcctgggtgagaccctgcaggaaaagctcttggagagacaggagaagacagccaattgggtaagggttcctggacagaagctgacaagagacttttggagggggaaggaggaagaaaaaaggatatgggtgagggtaagaggtaacggacctgagaggagacagagatgggcagagggtgggaacacactggtagcataggctgggcaactgcagggagagaagcaggcaagatgaaacaggagactggcgaaagaggaggacagagaatgtgaaagaaaggtgatgagaggtgagagactgggtgagatgggacacaactagaaagagggaaaggtgggggtagagatgagcttagaaggcagagttgagtgaaaggactaaggcacaaggacaggtagtgggcaaggatgcatcactaaagatgggggggggggaatgggtaaaggagattctatagggtgatggtgaagggcagacttggaggaccaagaagatgcaggttcagcacacagctggggcttagtgcatttgtggaatagaaggatggatggatggatggatggatggatggatggatggatggatggatgggtggatgggtggatgggtgggtgtgtgggtggatggatggatggatggatgatcgaacaagcaggacctgattcagggtaggcagaacaggactgatgaccactgctaacacagtgcctgtttaggaggggtgtataggcggtcagatgtaatggtgcccctccctgtgctccctggcaggtctctgaatactggctgaatgacatgtatctaaacaaccgcctggccctgccagtcaactctagccctgctgtgatctttgctcggcagcacttccaagacaccaatgaccagctaaggtgaggccaagaagctccctgggtgctcagcagggaaatccacctgagatgtggggcagagcctcacatcaggaaagcgaggccagagcttgtacattggctgagcttcctggggccaagtaacaagagacatcttctcccagggtcagacatcaggccagggggaggttaggtgtgctgtcactccataataaacacatttatttgatggtgctaatggggaccatgggtctcagggacccacacaggtgtctgagagttcctctgtgccccctggagccctgcttcagactcctgggaagggacatccctcccagccggtgcagctgccatctgctgcaatttcagagctcagtgagccgctggaagggcctctaggtgcattgagaatggtggcagtgtggataggggccaggagaaggctctccctgttggaatctgtcaggatttcatcctcttaatgtctccctcagtggggtgaacataggcgcagcttgcccccatctcctctaaaaggaagaatgaggatggataggttctgaagacagttctccaaattgcgtctgaggggcattttcctcggatgcaattaagccaggcctcatcatccatagacagttaagatggcgcagtctcctcccaccagtccctgaggctttcctcccaggactaactttccttttcattagccattaagtgaatggcttgcccccaggagactgcatctcccaaaagatcccgccacagggctggccttgcccagggggagcctcaccccctaccttcccttccctgcctcttcaggcacctctttttcctcaaggtgattctggcttcccctccccacccacccagagccaaaccatccccagttctcacaccaaagaaccatttttaatcagaggccacggtgggctgacagcactgggggaggggcagcacagcccacaccccattagcgcacagggcctggcatatggcaggtgatacatgggtgagtttggagcagggggaggggcacagaagggaggaggaagttaggaaggaaaaaaggaacggtgggagagtgggggatcgtttgtctgacttataacacacctctctctacatccctgcaggtttgcagccagcctcatctctggtgtgcttagctacaaggctctgctggacaggtaggctggggccccagcctggaataggtaggtctctgtttggctgtctcctctcacatctgtctccaagacatacagggtgcttgagagggcaggtaactagtctttgatccagttatgtggtgtctcctgcccactgccagcgccaggacattgcattagtccagctctcctggctgctgaagtaagcccagcctttctctgacctttgagaatggccctccctcctgacctcttctttcctcctatggtgtgaattagagagatcccaggaagtgtggagaaggaagcagcattagaggaggtgctggtaggctcagtggtatcgccgggatgatgggttccctactttgagccttagtgtctagatgcccaccctagctcagtgaacatgcggtactcctgtaggtgatgagagctatgcaggcaatgagttctccttaatgctaggagaattgtctccctcctagccaaccctggggccctgggaacactgaggagagcaaggagctatggatgctggaacatcctatgcgtagataataagcaagtgaagctcagagagggtttgaaacttactgatagccaaacagctgagaagtggaacggcaatgagggtaaggggttgggttgggggtgtagtcatcactctgttctatgttgatcttggtcagtgtttacccaaccttgggacagaagctaagacacacattctctctggggaagagggtcagaaaggtgaggctcaggccctagggtcagcacaccagaataggaattgggttttagacagagcactgacttggggccagtctgatagctctcgttccatgctggactgccaggcctgtgggctgccccttctagccatgtgtccagagctttccttcttcttcagactgagcctgaactacttggagaacccactcctccattcacatagcatccctgtcttcagagagcctgtccctttcagcaccctggctgcagaggagaggagtgaagattccgaccctggcagcagaacccagggactatggaaccagccattactggcaggtttcaaccctcaacctcaactctcacttgagtgtgcagacgcatgtgtatgtgtgaacatattacatgcacacagacagacgcctgtttccacggaagtccagataaaggtccatgtgtcctgtacttgcaactatcatgaggctggagcatttggaagagtttctgggtaggacacgccattaactaactcttcactttcagtgtcttgatctccagaagataacaaatttgacctcttacctactttcagaaggttcccaatggacataaaataaagccccattccttccccggaccctgggcatccccactgatgcatctcctggtcattacacagggcccagtagagcttcgtttgcttctgccatgtgcatccgtcctatccctcctgtcttctcagtacacgcagtgccacatcccaatcagtaggtccaggagtctctgtggtcactctttctctttccatgatatttatggtgttcagatgagatcaccacctactccagctaggtcccaagcatccttcctacctacattattttcccaccatcactacagtcttcttcctggtgcttcctggttcctgggacagactttggtcctctccttatataagcagaactattaaaaaaaaaaaaaaagagccgggcgtggtggtgcacacctttaatcccagcacttgggaggcagaggcaggtggatttctgagttcaagacaagcctggtctacaaagtgagttccgggacagccaggactacacagagaaacctgtctcgaagaaaaaaaaaaaaaaaagcaaaaacaagaacaggatatgctgggaatataggaaggaaggtgacatttgaacagcacatataaaacagagatagggaagagagagagagagcgctcaagaaagtagagtgaagctataaactcctaaagcccacccccagtgatgtacttcctccatcaagtctacacctcctaaagattctataacctcccccaaacaatgccatcaatgaacatttctcattcaacctacaaaagacagatacatggtgagttagtaaatggataggtagaatatagatggatggctatacagtagatggatagtatataggctgtggatgaatgaatggatggatggatggatggatggatggatggatggatggaaggatggtgaattgatagacagatgtgtggatgggcttatgcagtggttctcaaccttcctaatgctgtgaccctcatgttgtggtgacccccccaaccataaaattagttttgttgctacttcataactgtaattttgctatttgttatgaactgtaatgtaaatgtgtttttaggtggtcttaggcaaccactgtgaaaaaattgttcagtcttcagtggatacattgatagtatatggatggatgaataggtagtgtatggatagatgcatgatagaaaaatgaatgtatggatacatgcatgatggttgtgggtgggtggtggatgtatttatggatagataggtgcatggtagatgtgtgggaggatgaatggtagatgagataagtgcatgagggatgatggatgaatgagtggatggtggtggatggatggatggatggatggatggatggatggattgatatgatggatggatggggacatnnnnnnnnnnnnnnnnnnnnnnnnnnnnnnnnnnnnnnnnnnnnnnnnnnnnnnnnnnnnnnnnnnnnnnnnnnnnnnnnnnnnnnnnnnnnnnnnnnnnnnnnnnnnnnnnnnnnnnnnnnnnnnnnnnnnnnnnnnnnnnnnnnnnnnnnnnnnnnnnnnnnnnnnnnnnnnnnnnnnnnnnnnnnnnnnnnnnnnnnnnnnnnnnnnnnnnnagatgaacaaatggatggatggatggatggatggatgaatggatggatgtatggatggatgggtggaatgataaacatataattcagaaaccacatgacaaatagaagtttctactttgaactttgagaaggtttcaaggagagataataaagaatagactcttgaagaaggaattttcttaaaaagataatggagcacaggggtagagggaaagatgtaccaagaaaagattggtgtaagcaaagggttaaatggcaaaaattacatgtgtattacctgagagtggggtgagggtggagttgtggaaattctgaggtgcctcatgagccacaagagtggaacaatccattacttcataaaatgaataacagccctgcagtagtgccactgtaaggtgtaccactagcctaaccacaagaagctataaggtagaagcccagtggtagagtatttgcttagcatgtatatggccctgggtttgatgtaaagacacttttgagaaggaggggggaaataaggttaccacagagcccatgccaatgccttccctccccctctgcctttccccgttttccttccagccaatccattcccactgactgggccaaggggcagctctcagggcagcctctctgtatgaagcagtactacagactcttctcatcataccggcttcctggccatacccaggacacactggtggcccagaagagcagtatcatgcctgagcccgagcatgtcatcgtggcctgctgcaaccaggtaagtggcccgttgccacaggcttcagacttgggggggatgtggagcacatagtggctaggtgtggtgatccattcctgcctcttcacaagtgtgcaggctggttccccaagtcatacagtgagcttggggcatgaagacccccaccccaccccccaaatagaacttcctagtcagtccgtccatttctcttcagcagctgaattataagaatgaaaagaatattcagttagggaatgaatcccctgggttcatatccctaagaaggcaaggacttagggtcatgaatgaggttcaatgtggccctggacccttcatcttcacagttattcactttcatatagtccatgcccttcctggaaattagatggatggacagaatgaagaataacagacaaggcctcccctgtgtacgactgtgggtctagaacttaacatttactaatttcatggaattgctcacagtgaccctgtagaggcagccctttgagtctttgtttgacaggtgagaagctgagacttagggaagctaatggtgtgtgtacaaggaagaaggattccaggtcctaccaactgcctaagtccattcaggattttcagacatggttctacaggatcaataagggttcctgtggcaagggaacaagctgagcatggaggatcctgacgccatctggtgcctaccgcaccatgtatcctgtatgctgatgctacacaaaatgtttcatgtagcaaagagtggtgcttagggaagggtcttacaatcttgaaaggttaagtttgacaaccggaagccaccctgcttcctaccctacacccttcttactgtctaatgctttcttcctgagctcatttcagtaaactgagagcttgggggaaaccccatcctccgagagtagctgtgaccactatttgaggggcttaaaagctagcaggaggcttcccagcctatctaacaccctgaccagccagacacaaaatgaaaaccttctttcattgtcattcaaagaaagtcaaactaagtgtttctcagcctccattcagcacattatccaagccttctggaaacaaccctagatcaggcttcatggactttgatgaggttgatgggttgggcgattacttatgtctatataccgaaaaggatgtgacaggctgtgtcaagaaagagaccctttgtcaagtccaaggatctggctttcaaagctgtatacacgggaagctcatgggtacacagatcatgtgcatagctatacctggtgttttgtgtattgttttttttttttaattttgctatttgtctacaactgttggcttgttgttgttgttgttgctgctgctgctgttgttgttgttgttgtttagatctatagccacagctctgtctatagctgtttgattgagttcactgtgcactggataggtgtaacacattttacttatccagtatactccaaaaaccagccaggttctttctgttgttttgctaaatgagaagatctggtctgcacacattttttttttttttttcgtatttttccatgcacgtggatgtgcttctctaagccctgggctaaattctgcatatacgagtatagctgctgacccatgggtaagcactcttagtttggagtaatactgccttccaacagtggttgtaccagtttatatgtgaccacctgcaaccataatgagctttgcatactctaagaaccacaaaaaaatagaaataaaaaagaggaaggaaaaggcgttctcatagctgggtttaatctggcctgtgataggaagagcttagagtcgagtacagtcaacagctttggatggtctccaaaagtaaatagttcagaaccattaaacaccccggaaaccttgggcctgagcctctctgtgaaggctccgtgaaggcctggagccttgggctggctgccacaagtgatgtgtttgacctgtttcccccacagttctttgtcttggatgttgtcattaatttccgccgtctcagtgagggtgatctgttcactcagttgagaaagatagtcaaaatggcgtccaacgaggatgaacgcctgcctccaatcggcctgctgacgtcagacgggaggagcgagtgggccaaggccaggacggtcctcttaaaaggttagctgcagtatcagcccatcttcatctcatcctcatgccctttagcttttcctcctccagggttaagcgcataatctcattcccatcagccatagcacggggtgctcagccctccaactcagggtggagcggtggggagccttgaaacagaagggacctattgtacctttgtattctgtgtgactctatgtgtgggtcatctgggaatgcaggaggttttgagagagaggaaggctggggacagctagtaactgtgtttaagggtaggatgtgtgatgttcatttggagccccaagtcactgaaagagcaggcagatggggccttggtgtggggaccgtttctgtagtttagttggcctccttcttcgtctggtttgtaggacttttcaacttgaatgtgactcatgccactccaattcttcttatgaagctcctaagcatcctcactagaaaaatattctcccttccccaccccaccctgtgtatgtatgtatgtgtgtgttcattcatgttcctgtgtatgtgagcacatgtgtatgtgagcacacatgtgtgtgcatgtgtacatatggaggtcagaggacaaccttagctgccatttatcaggtattgcctgtccaattttgagacaagatctttcactgtcctggaattcagcaagtaagcaaggccggctagacagaaagccccagagatccatctgtctctgcctctccccatgctgagattacaagtgtgttatactatgatcagagtggggttttgttgttgttgttttgttttgttttttggttgtttggtttggttgggtttgttttttccaggcagagtttctctgtgtagctctggctgttctggactcactttatagaccaggttggcctggaactcagagagatctacttgcctttgcctcctgagtgctgggattaaaggggtgcaccatcacacccagannnnnnnnnnnnnnnnnnnnnnnnnnnnnnnnnnnnnnnnnnnnnnnnnnnnnnnnnnnnnnnnnnnnnnnnnnnnnnnnnnnnnnnnnnnnnnnnnnnnnnnnnnnnnnnnnnnnnnnnnnnnnnnnnnnnnnnnnnnnnnnnnnnnnnnnnnnnnnnnnnnnnnnnnnnnnnnnnnnnnnnnnnnnnnnnnnnnnnnnnnnnnnnnnnnnnnnnnnnnnnnnnnnnnnnnnnnnnnnnnnnnnnnnnnnnnnnnnnnnnnnnnnnnnnnnnnnnnnnnnnnnnnnnnnnnnnnnnnnnnnnnnnnnnnnnnnnnnnnnnnnnnnnnnnnnnnnnnnnnnnnnnnnnnnnnnnnnnnnnnnnnnnnnnnnnnnnnnnnnnnnnnnnnnnnnnnnnnnnnnnnnnnnnnnnnnnnnnnnnnnnnnnnnnnnnnnnnnnnnnnnnnnnnnnnnnnnnnnnnnnnnnnnnnnnnnnnnnnnnnnnnnnnnnnnnnnnnnnnnnnnnnnnnnnnnnnnnnnnnnnnnnnnnnnnnnnnnnnngaaaaccccaaccaacaaacaaacaaacaaaagcaggcttcccaggatatcagccaaacatggcataatacatttcaataagactaggcataaaccctcgcctcaagactggacaaggggacccagtaggaggaaaagggtcccaagtacaagcaaagaagaagtcagaggtaggccgactcccactgttaggggtcccataagaacgccaagctctgcgagcataatgtgtatgcagaggacttagctcagtctctgagccattatgatccctgcttggttgggtctgtgggttgagttcttatggtatccttgacccttctgtctcccagtacccttcctccccctttttcttcagagttaccctggcttcacttagtgtctgccagctccagttttaaaagttttcaatcatcctctagaaactacttttcaaaccaaagccagccttcattggaggaatggcttcctttcttgcctctggtggacatcgtgtaacaagaagccagacttccaggagccttacccactgctaaggattgcgaaggaccaggcaataattcagactctgtgtgtgtatgtgtaactgaggaaactgagctagatctagggtgtgagagacagaggccaaagcctctgtccccatgcaagttagtgacaggaacaagacaaggcataaggaagtccaagtacacatggttgccatctctacccttctgaagcagcagaaacagcaagtaccacatgaatggcccagggcccaagttgccctgttctagaaaccataagagtgactggttagcaaagatgcctgtgctggtcaagtgtcctggggcctggctcccagatcataagtgcattttccaggcccagtcctagaaagttcttcctccagacttggtcacccttgggtaccatatccagttcaactcaggggccagagcttcaagccctcctaggctttcttccttgctagcagcacactgtcatcttgatttgctttttaaagatttattttaatctctcttccccatccctgagtgtggttgtattaggggcaggtaatacacatgtgagtgcagcacctgtccatagagtcaggaagagggtgccaggtccctggagctggagttacaggcagtcatgacgcccccatacatgggtgagttctgagccaaactcaggtcctcaaaagaaaagtaagtgctcttaacccctaggccatccctccagtccccttgacccaatttcttatcctaaatgacttgctatcctagagaaagctccactcctgtctggtcagtgctctgcctccctgctaccatctgtaaggtctgggaggacagagacctgtttgttttaacctccaaatctgccaggacaaccacagcagccatgcaattgctcatgttaaagacaatgatgaaggtttgctaaggatcctaggcccagatagaattaccatttaccagttaatgactctttcatctaaatattgagcatctgctgaatacttggtcctaaaaaagaaggctacagaggacacagacatatgccccaaatccattttcacggatatgactgccatgttggggaattaataacttagaatttgaaggtggttaattccctcagtagactggtgaacgcacaccctgctctttttccctccaggaatggaggcaggcatcaaaataatcacctctgctgcccagatagttttcactttattagcaggccagacccaagatgactgaacggggttgcctcaaggtctcagtgcttgggcagcactaatcggaattaattcgttaatagcacttggtctggctttctgaatggaagtgctgtttttaaaggaagttcagcagaaaggcatcacacacacctccccttgggcaaatcaattaatccaattagtaccactggcagtgtctctcacagcaggaaaccaattcctcccagagtggcaccctcttccccagagccgtcaaggaagggaaacagagaaaccatttcagaaatgagttctgtttccaagtgaactactgacagcagcatgaccaaagccggtcgagagagaaaaggaaannnnnnnnnnnnnnnnnnnnnnnnnnnnnnnnnnnnnnnnnnnnnnnnnnnnnnnnnnnnnnnnnnnnnnnnnnnnnnnnnnnnnnnnnnnnnnnnnnnnacgttcccagaggtggttcctggtcaggggtgggcagaatcatggtgtgagctaggagaagtagggtggaattctgaagacagagaaatatgtatagtagcctcctgagggaggggaaagaaacatccttggaatgaggtttttggactctttgggccaacgtaggagggtttggggaaccatcggtctcagcaaaagctacttaacattactacagtagactctgtacatatgtacacacacacacacacacacacacacacacacacacacacacacatcccgagttcagcttctctgaggatatgggggtggatgggcaagccatactatgatgctggagtctgagtggagttagctgctgtggtggtagctcaggctgccatggccaagtgtcacaggctgtgactaacaatagagtggattgcctcatggttcaggagactgaacttcaccaccgggctccacagggctgttttctcctgaggcctctcctagtgccttgcagatgacttcagcctatgactccacatggtcatttttatgtgtgggtcaatgtcctagctatccctccttcttataaagatactagtcctgttggattaggatccatgctgaagagaccccatttaacttaacaagccctttcagagggaaggggctggcttctgacagaaataagttcccccgtgggcgctatggtcagttagagatgaagttggtccaggaatagagagaagggaatgtgggctaatgcatccatccacatggatgttcaagttgcagagaatgagaaagatagtggtaatgtgaagggagagtgtgattcaagagtcctaatactcatgccagggaagagattggtatgatgtagtgacaagtagccaatgagggggcaaagagaactaaaaataattacaggctctagatccaaatgggaggggatggggaacaggaattgctgagaaggcgcctacccaacttggcccctgatatatggatatgaaggaagacagtagtgtcttaccacagggcaccaggtgggagcactcaggagcaccaggctccagttgaagcaggtggatggagcatttatagatgggttaaccatgcagtagtgctcttggggaatacatgaagacagagaatgggaggaatctccatagccagccatactcctccattcatagtgtctaggagttgctgtctgccagctggcagggtttgctggggaacaaaggaactcagtgttattgatgagccattcccagatatcatagattcccaacgcccagccgaagtccaggagtcccacctcccctgcctgcattggcagaagctagaaaggtgctctccagcagactgaccatggatgccactcataggaaatgtgccctctagttggaagagtcctcctccagtcagtcagttgtcagccattggagaaggggattgaccacatcagttctttacattgccagcacgtctccttctagaccttatccctgatcttctacaaagccctgaactaggacaggtcctctctgtgagctcccaggtcagcaagcccaacactctgccctgacagagtggcttgtgagaggtcagggaccaccaggggtgcagggggagcagactgcctgttgcaaagtccactgcttccctaatcccacatttgagtttcccctgccaagcctactcagacaccacacctggtaagtaccattggtaaccccagcatctatggcccaacactgagagtcctctaggaggccttggtgccagggcatacaggctacaatcagagacacatttcagacagcatcctgaaggaatgtggcgccacatacctggcctgtcatggcttaggagatggtgggacccgaggcccagcaagccatacagtggggttgtctgagtacgtgaaaatcctttaaaatgctggggacaaaagaaaagagaagaaaggaaggagggaggtggggggnnnnnnnnnnnnnnnnnnnnnnnnnnnnnnnnnnnnnnnnnnnnnnnnnnnnnnnnnnnnnnnnnnnnnnnnnnnnnnnnnnnnnnnnnnnnnnnnnnnnnnnnnnnnnnnnnnnnnnnnnnnnnnnnnnnnnnnnnnnnnnnnnnnnnnnnnnnnnnnnnnnnnnnnnnnnnnnnnnnnnnnnnnnnnnnnnnnnnnnnnnnnnnnnnnnnnnnnnnngtccagtacggttagagtgggctaggattccatttgtaaagcacactattgccctccagtgaagcaggttgggatccacttactcagataccagcctcagccacacaagtgctttcattttcttcatggccttgacctgggcatttccgtcctttgtcagagttttcattttgcctacaatgtacagatatttttgtccacatggcctctgcaacatcctagccttagaggtagtagctgggggcatgaggcacctagctccccaacctgagggctacactatatatagggggagaggggtagagtctgaagatgagctgggggcctcagaagggtctatacatcgttagaggacctccctccccatcaaactgtgaaactgtggcctcctgaacccaggaggagctaacaccattatcatggtctggaaatttaattagacgttcagccctgagtctggaagactacagtgcttgtcaatttgtaggagaagtatggccagcttggagaggcaccccgagccttccagctttcctgggctctgtgtggtgatcctgggaacagaccttacaggcagatgctctccatttacacagcccgtaaatatttatccccagtagccaattagaggcaaggcattgcttccaaggagggagctgacagaaggtggctgcagctgcaggaggctgtggccatggtttacaagaaccactcaggaagggggcagagtactgtttaaatattgtcatccagagctcagcaagtctgttggctttaaaaccaattacacattagcaataacagcctctctgatttaattggcccagaaagacctcctgagctttcggattggaatacaattttctttctctagggagggtgggtctgggctatggccccctctgcagcagaagcgcagaggccttgtggtgagagcacccagagcctggaaatgagaggtccagagccgaaggtctgctgttgacctggcccctcttgtcagctacagcctgagattcctgttccagggtggagaccccagcctccttcacgggtataatggggcatgtgacctggtacctggtgtaccaaaggtgtccactacatgagaactcttattagaattagggggaaatctctggtcactttgcccaaggcccacaggtgtgctgcccatgtagtcagacgatggcctgcagacctgtagccttcatgactctcttctttacatggcatattaacttattagctttttaccttggtacattttgtctcccctgccttctacatatcatattctacacacacatgcatccatgcgcacacgcgtgcgcacacacacacacctttttaaaaatttctctgaccttcactttgccagcctttgcctcccgttttaagcagttgaagtgaaaagtatccgagaagtaagctttgcttatctgccccaccccaaccccactgccacgcttgtccccagttctagagtaatggaactcctcatgttatctcttcttggaaatggagcttagaacaaggagaaagctcagcttgattttttgagttctctctctctctctctctctctctccctctctctctctcattgaaaacaaatttggggtcctggagtggtggcacacacctttagttccagcactcaggaggcagaggcaggcatatatccgtaagttcaaggccagcctggtctacatatcaagctccaggacagtcagaactacatagaaagcctctgtttcaaacacacacacacacacacacacacacacacacacacacacacacacacacacacaccaaagaaaataattttccatacaatatattctgatcacaattttttcttcctgatctcccagatccttcccacttctccgcccacccatctctatgtactctggtgatttgaatatgcttggcccatgggaagtggcactattaggaggtatagcattactggaggaggtgtggccttgctagaggaagtgtgtcactgtgtgggtaggctttgaggctccgatgctcaggctctgcccaatgtggaataagaatctctttctggctgccttccgatcaaaaggtagaactctcagcttcttctccagcaccatatctgcctggatgctgccatgtttcctgccatgataataatgaaccaaatcactgaaactgtaagccagccccaattaaatgttttcctttatcagagttgccttggtcatggtgtctcttcacagcaataaaaccctaactaagacacattccttctttctctctctctctttagaaaacaaacaggcaaatataaaaaccaaactaacccgaataaaactacagcaacaatgacgaagaaaaggcacaagaaatatgcacatacacacatacagatacagacatacacacacacatacacacacacaccaaaaaaacctccaaatccataaaaacacaaaacccagaaactacaatatataagcaagagacttataagattaaaaaaaatgcccaaagtagtatgagacaaaaaaaatctacaaaaatactattatgatttctttgttttgtttgcttgtgtgagccatctactgggcatagggcctatccttaagtgtgattatatgaccagtgaatctcccttggagaaagctaattttctttccaagtggttgtcaactggagacagcttcttgattagggatgggggcgcatgtccacttctcagcgctgggacccatctggctagcagctgtgcatgctgccctgctctcctgagttcatatgcatgtctgtcctgttgttgggagactgtttccttggcgtcctccatcacctccggctcttacgctcctcctgcctccccttcctcagagcctccgagcctgagaggaggggtttgatggagacagggctgagtgtttgcactctgtgccacactgtccagctgtgggtctgcatccactgcagaaggaggctcttctgatgctggctgagtcagacactcagtccaggttctctgtggccactaggggtccagggtagaaagtgtttctgggtatcagggctgactgagaggagtgggaatggatggaaaggaggcggagagggatcacaaggatgagggaagctgctgcacactggggttaggcagaggccccaggaaatggagacagggcaggatctgcaaaactccacggattataattgagggcaggaagaagggtggaaaatgttcctttgtttttttctttttcaaattacgttaaatttattttggagtaagtatagatgttcccaataacacggagagaagctctgtgcctctgcttacccaagagctgatatcttgcgaaactatggtacaatgtagcacccagggttctgagcgtcagttgctgggaatttctaccgccgcaaggattccccgaagtagagccatgcttgccttcctcccacctcaattgatctttagcccctggcaaccacagagctctccgttgttataattttgttgctttaagaaattacataaattaaattctatgaactgtgtggtcgtcagaattttttttaactcagcataattctccagggatttatttaagtttattttgatatttctgggttttgtttgtttgtttgttttgttttgatttgttttgacagggtttctttgtgtagccctagctgtgttgacactcttttttgacacttacttctgcagaccaggctggtcttaaactcagagatctgcctgcctctacctcccgagtgctgggattaaagactcccaccaccacacacagtttagcatgtaggtttttacaggaatatgtctacatttctggagaaatgttcaggcatgaagctagtgtgacattacagttgcctgctaagctttatttaattttttaataatgtatgtgtgtggattttttttcctgtatgcatgtctaatgaccttgagtgtccatgcatcacatagatgacatatcacttcccattccgtgtatttgctaattggattgtttcactgtgaagtttgagagttgcttgtatgaatacgtggctgttgaatacatggcttctaaatatttcttattagtctaaagcttatcttaatggaatattttaatgaacaataactttttgtttcatgtggtttaatttataactacaattgtacttttggtgtcgagactaagaattctttgcttaggtttcgttgtcaaagctttctcctgtggtttttttttttttttttccttctggaattttgtagagttatggaaatccatcttgagagtcagtttctagagaaagcatgaaattcatgtcaaagtttccttttctttatcctgtgggggttccactgctttgagaaccttcattgaagaaatggctcccattcctccattgaatgatccttccgtccttctcaatatcagtggggcatatatagtgagtctgtttgggggttcctcttatctgtgtgtttatccctctgccaatatgatatggccttgtttatgtagccatacaatggtcttggaatccaaaatactatactgattcctctaactttattctttatcaaaatcattctagtgatctgatttcctttcccttttcgtatagacttttgaataatctcatctctaatctggaaaaacaattctgctaggagcttgatggaaattctgttaaacccatgtatccattggaggaaaacagaactttacaatgttgggtctccaaagcctgtacatagatagctccccacttattctgagttttcattcttttacttgtggtttgtattttcagcataaaagcgtcctgtatgtttctgttagatttgaattgaagtatttaaattttatgaattttttattatcaattattgaagttttatgaattattataattggggttttctttttttctttttataaatgtttgtccgtggcatgtaaaactatactgaccgtttgtgtgttggttatatatcttgtaatattgacaaatccatttattaattcttcaagagattttttaatatctatttagtgtgggggggtatacatacttgtttcagtagagataaaaagacattttgctggaattaggactctccttccactatatgtgttctggagatcaaactcaggctatcaggcttgtcagaaaacatttttactcactgtgacatcttgtcagctttttgagaatttttaatagatacacagggcatcctaagaattactatgggtaactagtcatgttatatgaccatgggggctttttaaaatgtatcttctataaaccttttctttcctattacactggtcaggctgctaccactatgttgaatagctgtggtatggcaagagtggatgttttatcttatttcggatcttagaaagcatttagtctgactagaactttatgattgttgggatgttgtggcccagaaccaatcatcttggactatctttactcctcttagtgaccatcattgtcctctctgtatctaatctgtatctaagccacccctgtggctgtcaggtggccttggggattgtatgaacaggccacccacgacctttccccaacctcaaagctaagaaagtcaccagaacatccgagacatacagttctgctgtaaccgtcctgcctccacaatgagcccaccagtgtgtttgaaataaaccctaccttaagactttttctctcattctgtaactataaaagtgcaggaacagtttccacattacatgctatttggggcagcctgaaatccatgttcccagaccagggtcatccttacgaggctcaatcctcttctactataataaaattttaaagaaagaatgcaggtttttttttttaacctatagatctacgagctacagagcttttatagattttatttattaaattgatgttccattttattttctgagtttttagaaatatttatttgtgtgtttaatgtgtgtttgtgtttgtgtgtgtgtgcaaggcaggggccatggcacacatatgaaagtcagaggacaacttgcaaaagtcagttctcttttcctgtttcagggatcaaatccagattgtctagcttaatggtaagcccctttacctgctgccccaccatactggtcttattcttagtttttgaagaaattttatcatgaatggatgttggatttggccaacttttatatatatatatatcaattgttctgataatgtgaggatttttggttttggttttggttttgtttaattttgtttttttttttttttgttcttatagaagtctattgctcacttctatcttctaacatatggcttggtgtgttttatgtttgtacatgaggaacgctggtctgtagttgcgttggtctcttgtattatatttaagttgtgttggcagtgtagtaatacagtgggatgcattctccttatagcttctggaagaaatcacacagatattgtgttcattcttccttaagcatctagtagaattcttcagtggagtcatcagagcttagagatttattgggaggatagaagggcacataaatatacaatgccaatttccttaataattataagaccattttaacgatctatttcattcttaatgcatggtggaagttttatacatttcaggaattggtccatctcatctaacttgtcagatttatgtgtatagttgttataatatttttaattgtatttttatatctatggaggcctaagtgatgtcatccattctgttgctgatattggtgattcattctttttctctgtctctctctccctctccctccctctacacacacacacacacacacacacacacacacacacacacacacacacacacacagcacatggcactttaaatctctctttaactgttttacctgaattgaatctttaaattgtatacttgtattttcattcattgtggtgcatgttttataaattctattatgattcttattttaacttatggattattttcaagtgcactgtttaacatgcaagtgtgtgttatttcctgttatttcctgttatctgtttctatcatagtcagagaacaaacacatcttttccatttttgagggctgttctatggccctagatgtagtctggtttgctatatgttcagcaggtgttttaaaggaatgtctactatgctattgttggatgaattattatgtaaatgtcaaacacctcctgttgggttgtggtgttgaattctgtgtcttcactaaatttatacctagctgttgtgtccaccattggcagaaaagtgctgatgtctcagctacaatagtacgtttctatatttttccctcctgttttgctttgcttcacatacttgcaaagtatttgttactcatcacatatgcagtgccatgcccttttgcagatttacccttttctttttacataatttgctcctaggtctctggttctgttatgtttgaagtatatatcacactaattcagattcatggtttcttttgattaatgcttgcatgaaatagtactttccttccttttgcttacagcaaatttatattatacttgacagtaagctctttgtaggaagaatgtagctgagtaacattctaatatattctaccaccacttgccactatttctaattggtgcatttagattatttatacatagaatagttattgatatgctttggcttaacacattttatatttttgttttctctggttttttttccacttgattttgacttttcctctgtcttgccttcttgtagatcacatggtcttttaaaatgttctagtgttttaacattatctgtttgtataacctttctagatgttcacataagtattgccttgggtttataacacacacttaccagtctgttgtgttgaatgaaccagctctagtgaagtgtagaaagcttactactttcccttcatttatgacacactcatcttgtctttgtatatatttagagccttgtgagtcattgctacagttagctttatactaaaacataaaaaaaaacctccaatgaacttttcacttagattctcactcttccaagtgtcttttcttacttggtgatgtgccagtatatcctatcacaaccgtatttgttgtggagctttctttagttgttcttttatgctagacaggctagagataaattttctaccctagtccaggatcaaaggcaagcaccgtaccagtgaatttcgcctgtctctcacttccaaatgctttgacttctcctccatgttaaagagtttctgtttggtagaattccatcttcccatttctccttccacccagccccacagggtctaggaggaagttactgctgctctcaacacttttctccacagacagtgccatttctgctacttcttccagtacctgactctgttgttggtcttcatcaatctaatatgacatatgttggtgtggatgtcttttaacttactctatttagggtttctagtctctttaatctttagatcgaagatttttactaactctgggagttttagctgttgttcctctgagtacttcctgttctgctcttcttctccttcttctgggagtttgataacataatttacatcttctatgttgcaggttttataggtgctgttcattctttccctctcttgtctttctgatgttattccatcttcaagttccctatctctcctctgcctcttacattctgcttttgaatacaactactgattttatacttttatatttgctggcattatatatttacttctaaatgttttatttggttctttacatcctttttttggagtttctgtttatatgcggatgctatatatgctaatgctatatatttatattctgtttacattctgcctttttctttgtttgtttgtttgtgtctttttaaacatgttcaaatttgcttgttgatacgcttcatgattactggatttaaaaatgtatgtcacatagtttaaatatgtccttgaccctgatcaggccaaacttttctgtgtcttgatgtggtgactggtttctactgggacttgagtgacatgtgttatggggccctggtgttctgtaaaccttctgattcaattgtctcactatgctactgatgcagcaggtgatggaagaggtgttacctcattgcatctaggtgaaggcagaaatccaagtccttcattctgtcagcactctggttggggaggtagtctttattactgttaaatgagggttcagggtctctacatgcttcctgtgtgtgccatgtgaaagatggtagggtggagtggtcaccatttagtggagctggaagtcccagctttcatgagaaaccatggcgtctctatcctcagaggtggaggtgcctcagtacagatcagtgatagcacaccaggttctctgctggccttgaggtgacagcagggggcagaactgatagattatgggtgtatagagagttgagtacttgtacattattcctgttgatatgtggctgaagtagaaaggctattatctaagagttctcttttctgtgtgtgtttgtgagtttgctttgctttttgttgtttggtttgctttacttttggggggacaaggtctctctattatgtagctctggctggcctcaaattcacagagaaatacctacatctgtctcccacgtgctggaattcaaagggagttgccactacaacctgcttatccaagagtgctctattttgctgtgaatagagaaagcaggtctgagtaggaactttgtccttgtatgtgagtgttcccatttgtgttttcatgtttctcatttcttctaatccagatgttgactgtgttagataaaaaaggaagggggaactctctctgtgtcggttgatttaagatgccgtaacaaaaacccaacagactgggtgactcgagagtgactttctgacttataggaccccagagtccaggatgaaagcatcagaaggatggttccttccccctgctcttggttgcaatcttctgccttcccattgtgtgtttaaaaggctttttctctgtgtcagtgtcactggtgcatctccggatatggagcagtcttgtcagccccttctatggcttcatttaatcctagttatcattccaatggttccttctcaaaattcagtcgtaatggaggttagatctttaataagtgatttgcatggagtacaggtcagcccaacacactcaaaggacccatcacaacgggtcttttttaggttgtgagattcctgtctgggaggctttcctctttctatcttccaaagccttcctatgtttgttttaaatacaatatttatctatgatatccagtgagaggggatggggaaaaacaaaacccagtccgttttcctggaagacgagactctccctcttgaaagatttaaaggagattttataactcaattcagatcggttctaattcaaaagagacaggcttcattgataaagacatacttttgttactgtcttggcccctgggagctgggatgataaagatcacctctccgaggccatagattaggggaaaatatcaaacatctgatggaaattttatctcccaaaagaagatataatccactgttttaggaaggaaggttgttataatgcacatggtagatgattagaagcctcatgtctctaagacttcctgacctcatctccaaggatggaaatgtgaactgtaccattacgtgatgcacaccagagaaggcaggagtcctgggcagggctgtgaacaggtgtgcgtgcctgttagagagcgggacctgagagtctgacccttctaaagcagaggcctgagatacatgctgtatctttgcacatctgagtaagtctggaagctcctaacctccaggcctctggaatttccacagcaccaaagctgtgagcccctgagtgtgatcgtcaggagagattccgtactactcaagtcccacctctcatgggcaagtaggggcttcttgagggagattgattcactgcattaagcaagatccccctggtgtgctctgtgcagaggtcacgagagacaaacgacccctgccacaagcctccatcccaccacctagtgtttccattagacttgggcctcgctcacagtagatgagtttgcatgtgcttcatttcctgcctttcacaataaacttgtcagtatttgacggatcagcacttgcattcagggagatcatttgcaaggccacctggcatcccggctctcctgtcctgcccccatttcagtttgcctaatgagccagggcctgattcctggtgagtggttctgagcttctgggccagacacagccagcatttgatagtaaggcctcagcccctcctcagggatctttctctgtctgaaggaggtcaagccactagcatggagaggaactgtccgttgttttctgcctcaagcctgtgctatgttgtgtggctgagaggggtgtccccagccttccctctcccttccagaggttggatcaggcttgcagcagcttcttccctagtgggataagctagctatgggcttcctggagagctgcagcctgcctatcccacactgctttgggcttatttctaagaaatcctggttaaggaagacacaaagccaggcttttagtattccccaagaaatggccaagagggcaacgatctatagcattctagttgccgtggcccctcaccagctagcatgatcttattcttcccacatgccgaggcatccttggctctactccaagcacataccttggccctgatcttcttgcagggaggactcctcattcctgagtctgaccttcttggtggtctgctcccaatctggtcttggggttgaatgtctggaacaaatccagccttctccagtcactgggcaattattatcaaaccccatgtttaagtaaggtcttggaaatgtcctacagtctggttatttattttcttgtttcttcaagtgggatgtgagactgttgccagtctcctgttgtagcacacatgcctgaattgacacttgacacatgacaggtgctcagctgggccgtaacctcacatcactgtggtcatctggcctcaccgaaatcctataaccttcacccttaagctggaggacaagaagtttatccctaagttccacccatgtggctggagtttgcttccagcccacccaccgtcctggctatcacctcccggatgctttccccctccctctgactatgtggatctgacacgggattgatcaagtatactttccccatgttctgaaggcactgtctctactgggaagctaaagagacccttagcacagcgcaccacacaaggcttagtgccgtggctatcctcatggatgcgtgccagggaaaagagggggatggagtgtggagaaccctatagtaaagatgaactctatccagttcccaggctacccctcctcctacctctctactaggcttatgagcaatgggccatagattctggtcctttgtggggctttgaccattcctataaggctgctgagctgctacaggcctatctcttacctgggcacagatctcactcccatctgggccaggctgaggaaagtgccctgcaatctgttactaatatggatactcttctttgcccacattaaatggaagtcttttcttcaaagagtgcatagacatggaaaagtacccagacctgggaggctgcatgacagccactttgagggcctaggatgacagcagggtcacacacacggtgtacagaaaacggcaggcatatggaagggtgacacagccctgtgtgcaggagctgcagtgtggaggaaggtgggaagggcttcctggaagtaaagaggaggatctgacccagcataccctccctgtgctccgaagacagtgaactgtccaaacgaacccgcccccatccctcatcacccacccccactgcctacctcctccccctgccacagagcacacagtgcaaggctaagtctcacggctgtcttcaggttagagagacaagaggcatgctggggagaacaggcacttggttttcttgcctctagattttattggaagaatttagatgttcgctcacttctagcaagaagaggctgaaagttgtagcttttaacccttagtccacgtgcaaggctaaatgcagggtcctctgagagggagcggggaggctgtggatacaggcagcaatcgctgcgaggcagtgcaatgggtgatgtctgatatcacatcccacactgcctgtgcatagggcactctcaccgtggccacagaggctacagggtgtccccattctgtcacagcatctggctccacccagtccaagctcagccctcttctctgggtcttgaagcatctccttggaattttagatcaaagctgtgaggttttggcttatgatggacttgaaattctgatgaactttaaagcaaaggatgggttactaacacctatgacaagggtggtatagtggaaaacacacactacctcaagaaagtcacctgtacagaagacagaaatagcagaagtgggagcaggtgcccacactgggtcccacctgctgggtaggcttgtcagtctcttggggcatatttgaggctttctgtaagaataagctgtacgctctccggtgatatatgttttgcacatctagtggcttctcgcctctctgtccggataagtgaggtctatgtgcctgaaccagtcccagacagcttattatgttgcagcatcagctgtagtcttacccttcccctgcaactccaactctgaaccaacaatccctgggggtgacggagggcaagcaatacctttccttcaaattctcatgtgaagttgcctaatttaaaaattccaggaacaaatttaagtacttggaaaaagtcagagtcagtgagcaatgtgcacagacatggtaatgtctgtgccagagtgagggtgctgttggacaggggtgcgggagcctgaacaggactgaggcctgaagcatcccttcatgtgggcaggcaggatcagtggccccacactgggtgaagctctggccactgctagggaccactgggtagagcagaggctaggacaggacagctgactgcatggccctgtcaaggctgacaggctgctggcagcttgtgacactctacaggtgccccagactgaagccacactcacctgtcctacagactccaccaaccgggactccctggacatgatcgagcgctgcatctgcctggtatgcctggatggtccaggcactggagacctcagtgacacacacagggccctccagctccttcatggtggaggctgcagcttgaatggagcgaatcgttggtatgacaagtccctgcaggtaagtgccctgtgaatggccctgccactgcatcacctctccagcttttctgaatgtccaccccctggctgaaccattttaacacaccaagagaagcagggcagtccagcatctgataaatacatcccaatgaacaatcaaataatctatagcttttcattcacatgcatcatgaaaacatcttatttttggcttagaggaaaacactcttgctttaggttggccattccttgcaaacttcaatccccctgaaaaccctgcaacctgccaaatacctaatacaatcttgttcatttgcaatgccaccacactctcacagtgactatatacaagcaagttagccatctctctgggttgggccagcctacctccataagcattttccagccttgtctccttttctcctcaccccatccctgcatttggtgggttatcttctttattggtttgcatggtgatcctgttatttctgatgtgttctgctgctgctgctgggctggctgtttagcctccacagtgccgctaatggcttggaatctttcacagagcagtgttggaataaaattatataatggatgtacgtgacacagagcagagtgagtgttgagtacagtttttcagagatctattttcctccctttaagtgacagggacaaaaaggtgcccatagggtgtgatcgcaggttccccaggtgagccaggggcactactgaggtgtcatggacctgaacttcaggggatagaagatgagtctccccatggaaagacagattgctgatggagggaaagagtcagggaacgatgtatactcagagacgctctgtgggtgtgtgattgtttgttggctggatcactgagatccattgagattccagtgtctggcacagatagctaagactggagggaggcatgtgtgtgctgtggtcctctcagcaaacaccataagcactcattcctttgctcatttgtttgttcgtttaccaaggggaaacagcgcgaggaactccagagcaccccacttcatgtggggtacagttcaagagtcattattcaagagtcccattattttctcttaatacttttgagccttgagaatatttctttcccaggtaagctcgacatagtctttgtaaaactacgcaaaggggcctaaggtacctctacagtgtctgtgggtcctttcatctcaattctgtgagctgctttactgggctggtttaaatgaatcctcaggtccagggttgcgaaggctctggtggatggatatctcctcagtcagcagacacaacagcagactgagttctgttggctgttgaatagagcacgccccccatacctttcccaccaaagaacctgctctttctcctgacaaatcttcttaccagcaaatcacatctttacattttattcatttatgcgacacaattaccggcagctgctctgggatggacactcatctagatcttggggctaaactcagtggtggccaataggagcagagtcggtctattaggcaaatggttgctgaaagcactggaggatggtgtctgctgtgcatgcaataaaggacaaacaggactgagcacacactcgggcctatagaccgtgcaccagacagtatgagctcactaagaaccctgcgctgctgcagcagggaacttgggctgccctttctctgcctaaagccctgtaggaagaacttcctcgaggcttccatactgttgggtacctacagccatctgcagcatccttgttaggaatcaacagtccttggtatccttggaggagaaatgcccccaagaggtcagggggtcctaacccaggcctccccagggtcagctcacctgcctcttctctgttgcagtttgtggtgggccgagatggcacctgcggtgtggtgtgtgagcactccccttttgatggcatcgtcctggtgcagtgcacggagcacctgctgaaacatatgtgagtctgggcagagcagagaaagacctcagaaggctgccatgctgagccaggaggaactggggtgtcagtccagaaaatgactgagccaaagatgaaatttggaaagaagcgcaaagactgcaaaatgagcgttatgagccacagatggaggtgcaggctgggcaggaaactcggggtagacaaggagaagtggggggatccaagtgttgatccagggaacttagatcaatcttttctcttggccctgagacagtgccaggtacctggtagccaagtgcagagggaggtctcctccatcacaggccagatccccaacttccatgctgctaagccctgcttgtctatcccttagtacaccacattccttctagcttttgcagttttgctcacgctcttcttggatgtaggttcacaatctcttccacaaaagtcattggcatgacagagacacgaaccagcctttggagacacaacaactcagcctgctaccacattaccaactctctcataaggacagagcaaacatggctgaacactagaacgagtgaatgcaaatgataacccgttagagtcaggtggaagtggctgggatcctggctctgtcacagagggagtttggtttatctgctcagtgggcggctcgggcacactaaatttcaggggctgtgcacagcaacagctaagatgcttgcacaggaaagctgtgctgcccacagcccttggctgtagggtctcaggaagttgttcctttgcgtctgcaggatgacaggcaacaagaagctcgtccgagctgactcagtgagtgaactccctgctcccagaaggctgaggtggaaatgttccccagaaactcaaggccatctcgcctcctcggcagagaaacttcaaaggtgagggaacccctatactcccccaccccctatagctgctgaagcaacctggaagatgccaaaggcccctaggactctgctcacctccaggctccacccattctcatccctcatggtgaaagtagtcaaactaaagaggagttatggttctcaggaaataaccttgctcgaatgtctaccattttcataaaatgcaaacctgaagctattttttccctgcgcgtttcacctgactaagcagattcaaggctgggaatggattccctgctttgagggagtaataaacaactgctttgaataggtcatttgaatccaagctatttcaatttgcttgagtttacactgcaacttgacaagggggcctttttcccaggggaggagctggttctggcaatagcggacagaggcagaagggctagctgggcattgtctttgtcggtctctgggtgaaaatattcatttactcaatcatcaaactctatcgtctgtgctccaggtctgtggtaaaccactgggacctcagaaatgaatgggccccaggtttgtcctccatactctagcagaagaagcagatcaagccatgtacaaagccatgaaatgcccgaaccaaagaggcatggagacccaaacctgcagatagacaagggattgaactctgcctggacagtgagggagggaagggtcaggacaacagcttttttaagcctctgtaggtttataaaatccaggctggtatggagagagcaaatgagaagatagctagaattggaacctaagagagaagctgagccatgctgagaagagcctgccctgcccattcctcctgcttaggagctgttggggagacagtaagaagtccatgggggtagcacaggtggccagggcacagtgtggccaggctgggaaacctgggatggagacactcctcgcttggagctgctgtggaggcagcctggctttagtgaaagaggaagacagctctgggtttccatggaatgttgttgatctcttatctttcatggtgggggtccacggtgagtggactgccagaagagggagacagagagaaatagctgatgggtctgcttattctcaggaacttgggtgctcctatgtcccccagtttctccctaatgaggcatgaggtgttacctggggtatggatgggggaggggcacgagatgagcagagtctggagagggggctttctgagtggccatggtgataaagaaaagtgcccaaggagtctttcaaaaggtggggggggggtctttcctgtcccaagcatctgcatagctccttatatagctcatgtgaggcaaaaggacccaattaaggcgagtgacagggacagtgtgaggcagagcaggttactcctctagcagctgtgcttacacctggctgagccagtgacacacaccttgctggcaatgcttccctcccccaccccccactaggtatcagactagaccccaaacccattataagagaatactggccaatacaagggtagcacaggcatttctgtgtagacacagggaagtttcctgataatgatagggatatcctgggaggcatgcccaagtgaaccgtcagatgggatgctttagagtctataagtgtcctggagggaggtgtggctttcaggggcagggcagagggttagaggataaccaaagccagctgtaccaagatgttactgtcagagctgggtttcaaataggaaccaaagcctagaagcagaaggaaggtgtcacaaatgggggcctgcctgagctctggtctaggggtctgggactcacatggggctgccttgcagagctaaggagaatcgattgaatagataaaacggggcatccgttaacaagtaaaacacgtgaacagagttccagtccttgctggagctatcacaacagtctgtcagatcccaagtctttctgccccagagcacagcaaggagagactggatgacagctggctgagaaattagctgttaggacagttgggcatccacagggacactggaccacacacagtccctacacaggtcatataaatggtcttttccatgcctgctttatagacagctagcatgtaggagtctgtgtgtgaacgagacttactctgcccatataaatgtatcatttgcatgctcctcccacttcactgctgcactcaggcccacctctccctagaagcagatgagctcaccttcctagatgagccccagttcctatgtgccttctgccacttgcataggtgagggtacatctctgacaccctagggtatttctggatgataagggctatgcactcaccttctggacctagggcacagaccaggatcagaaaacatggctgggttctgtgtatataggggtcttatcttgcatgcagagtatcttctttctcttccacagaatcgtaaagaatctggatttcattgtttataagtttgacaactatgggaaaacatttattaagaagcagaaatgcagtcctgatggcttcatccaggtggccctccagctggcttactacaggtgagcaaaggcaagataagcctgggcacaggtggactattagatgagatgctttggagtctagaagtatcctggagggaggtgtggctttcagggtgggggcaaaggactggaggatgaccaaagccagctgcaaggagatgttaccatccgagctaggtttcaaatcggaatcaaagtccagaagcaaaagaaaggtgtcacaaatgagggactgcctgagcaatggtcctgatatctggaactcacagggtctgtcttgcagagctaaggagagtcggttgggttaggaaggccatgaacttgtagggactgctctttacctgatttcctccactcatcagaatccctgtggtgtgacccacaccttcctggtcttcctagccttgttcaagacatggaaacaatggtcccctccccccaggttagcctgttcaaagaccagagggtccctcttgatcttttctttatttatccatatactcccatatcagttctccaattttctctcaaatttgccgcctgccctcccgactactaccatcagcccctcagaagctaagagcaacctctacttggccagttgtggcataggccccagagatggccgttcctgcttgtctcctctctatggtcctgtcttcatgaagagtggccttgggcatatgcaaatcagcctctgccactttgctgcttctcacctgtcacctctaactgaagggccacctctcagaggtctgtctggagatattctcttaccagaagcaaccatcttaggctctgttgtcaccctatgatattaaactgactggcaaaagtatacctcctatagagacagatgtggggccacaccttgctctatgactctgggttcccattagtctcagttctgtggtctttcttcttcctcatagtcaaccccatggatgttactgggtgatggggattagggattctgccagtcacggatgcaaacccagggctgtttacctggttcccatgcagagggagataggctttctacacaccgtcatgagctctgctagagtggtcaggaagctaaaacaatgtgtgaggattccagacacagtttttcccatgagatacacttcgatgccctggtgagcatgggcatctgaccacactcaccatacttactgactttgactagaggtcatggctgaaccatttaaagtcaagcaggcttctgtgaaaggtgtgggtgaaaaactgcactcatctgaccttgagatattaatcaacactcattaggtctcacagaaaattccaggtttccttacagattggcggtggtgttttgttttgttttgtttaaaaaccaatcactcttcgggttttcccagttcgacgctgcagaacgacggagnnnnnnnnnnnnnnnnnnnnnnnnnnnnnnnnnnnnnnnnnnnnnnnnnnnnnnnnnnnnnnnnnnnnnnnnnnnnnnnnnnnnnnnnnnnnnnnnnnnngagggctgtttacctggttcccatgcagagggagataggctttctagacaccgtcatgagctgctgctagagtggtcaggaagctaaaacaatgtgtgaggattccagacacagtttttcccatgagatacacctcgatgccctggtgagcctgggcatctgaccacactcaccatacttactgactttgactagaggtcatggctgaaccatttaaagtcaagcaggcttctgtgaaaggtgtgggtgaaaaactgcactcatctgaccctgagatattaatcaacactcattaggtctcacagaaaattccaggtttccctacagattggcggtggtgttttgttttgttttgtttaaaaaccagtcacctcttcattttatgtcaacgcagtgtccccagtgtatagaagtgtacatggttcttcacatcaaagacttcccagcattcatctctggaattctcctctagaattctattaacattaaaatgaaataccgtgccacgtcatgtcagagctatgaaaataaagcctgctggagctatttctctttcaggatttatgactccctgagaacaaattactgtttgccatccatcttttatcttgttcaggctttaccagaggctggtgcccacctatgagagtgcatccatccgccgcttccaggaaggtcgggtggacaacatcagatcggccactcctgaggctctggcttttgtgcaagccatgactgaccacaaggctgccgtgctggtaagccccgctctgccttaaggggccacagggaggccagggaggccaccatgggccacggtgcactttgttccacacacacggactccctggctgcatctgccatccacggctgaacctcttctttgttcacaggcttctgagaaactgcagctgctgcagagggccatccaggcccaaactgagtacacagtcatggtgagtggccgttcctcagcagcgccaactgctcagtgactcggcaaggctaccacgtcccgtttttattcatttttattttatttatttttacggcactgggattaatccaggcttttgcacatgctaggcaagtgctgtagcactaagctatttggggagtcctttttttttaacttttttattttgaaacagagtctcatcaagttgcccaggatggccttgaattcactatgtggccctgctctttaatatgtgattctcttacctcggtctctcaagtggctgggattgatgaaaggcaggttccactgggcagggtcttttcatcataggtaacacaccctccctgccttccccaggttccactacaggacagtaagtggtacttgaaacctgttgacataccataacgatagtaatagctcacaatgtatatggtactttacaatatttatagggaccatcaggttgggggtggggcagcctgatgaatattggtggcttgttccctggcacactggaagggactcagaatttattatcacctggggctgattttccctcctgttttctatatgttcatttatgctgcctgtagactgaaggtctttgctgaaaattaatagtgaaatcaaaattgtatgaggactatttctctagtttgagggaataatttattttttaattttgcaaagctattatttgcatgcaaacaagagggagcttgaggtagtgatcaatgtgttaattacagatcactcaaaaacaagcagaaggatgacaaaaatcgatgagaaggattgagcagattattttgtatatacttgagagcaattccaacatatttctgggctttagaattcgtcagtgtagactttcctctaactcagtccctgattcatctcaatagctatgtttgctctgtttaaacactgtattaaccaggcatgatagctcaggcccgtactccaagtactcaggagcacatggcaggaggatcacaagttcaaggtgagtgtgggatctgagtgagacttcatctcaaaaagctcttagtcagctttgctaccacgctagcaaacaagggaagatgaatcaagcgatcagcacagggaagtgaataacagagacaattaaccaatcagcacagagaaggaaataatggagacaaccagccaatcagcacagagaaggaaataatggagacaatcagccaatcagcacagagaagggaataataggtacaatcagccaatcagcacagagtaggaaataatggagacaatcagccaatcagcacagagaagggaataataggtacaatcagccaatcagcacagagaaggaaacagcctattttggctcacagtttcagagtcttcagtccatggttggtggcttccagggcttccaggctagtggaaaggcacactgtggaagggagcacatgatgaaacaaaaccattcccttgcattacaaagaaaaaaaggaaagaagaggactagggtctgggatgccacgatccacctcaagggcacacctatcatgataggaagaccttccactgggctctcttaaaatttccacaacttctcaatggcatcaagcctttaatgcatgagtcttggagacatttcaaatccaaactacagtaagtgcctgctctgtagtcaattaatttcccccctgcttcatgctaggctaagtgctatctatacacaggaaacaaaatttggcatctgtcttagtcagggtttctattcctgcacaaacatcatgaccaagaagcaagttggggaggaaagggtttattcggcttacacttccatactgctgttcatcaccaaggaagtcaggactggaactcaagcaggtcaggaagcaggagctgatgcagaggccatggagggatgttctttactggcttgcctcctctggcttgctcagcctgctctcttatagaacccaagactaccagcccagagatggtcccacccacaaggggcctttcccccttgatcactaattgagaaaatgccttacagatggatctcatggaggcatttcctcaactgaagttcctttctctgtgataactccagctgtgtcaagttgacacaaaactaaccagtacagcatccctatgcactatcagtaggtatttaacaaggattcagaatagagttgcttcaaagttatgtcagacccacatggagaagagtcctaggaagttacagagaacatggcagggcaagtttcttcctctgctttgaaaagctgagaagccttcccagaggaaatagtctttaacttgaggtgtgaaggattaagaaaggggaggaaaaccaaggagagagcagcaggttataaaggcaagagtcttgtgaatatgatgtgtctgataggaaaagcagctcggtgggtgcagcttgaaaagactggggagcagaagaactgggttgtctgttactccagtgtggggctgctgcatcctccaggaggatgtgtgatgctcatgtggccaaggtagaaggcaggaaggctggaagccatgtggtctctcttataggggccttcacattcaatgacttgatcacttattaaaagcttagcctcttagtaaatgtcatcgactagtaacttttgagatatgattcttttgtggttctgagtttgcctcactgctgaggtgtggaaatgcagctgggaagacacagtagactgcatttaccctacactcgctgtcgggtgttgggcttgagggaagcaccaatacaactctcaggggtgggaaaacacagcctaagatgagggagaatgaagctggagttccctgactcctgggtaagcatccagtcactgcttgaaaccacacagaagagtcgggaatggagggttggtggtccatggatctgtgatgagaagcctagagccaggggttccaaacccctggacatccagactccactgggctgtggggagttgggaacagagttgggtctgtggactgagaagcccagggctagggggatggggaactccagcttagctcattagagattgtctttagcttagttgcaattgtctgggagcatggagctttcttcaggagacttacagagtgtagttctgccttgataaaaaagacaatccatgcttatccataccatttactgactgttcatcatcaaaaatgggtgcataccacctcctctgggtagaccagagatgaaatacctttttcaagaaggaatatcatgtgttctgggccaggaatctagtaaggagcagagagatgactaccatctcatgtgggtgcctgggtgctagggtctctgaacccactacaaccctacaagtttcctggtatgatccaccaccccacaaatttacaaaatttttattctataaataagaacaggaaactctaaaatattatcaagaaataaagatagctctagggtacagtgtagcagaaaatgtcaatggaagtattgggagataatatgaggtaacctactttaaacactaacaaaacagaggtgaaatataagaaaggtaaggtggcttagttcaggtgagcagtatcccaaataatagttgcttagaaagaaaaattggagagtagacaacaaaaataattcaagaaaaataccaaaagctgtggatagttcaatgatagagagcttgcctaacaggcatagatcccagggtactatccccagcacagaacaaaacaaacttcagaaccacagaaaatgcttctatattgagggaattcaccatcttacataataggaaatatttatgtgaaggaaatttatggccctataaacaaagagaaatcctaagtttctccgaggaaaaggaaagacaaagatcataaataaagacataattggtttctcaatagcatcatcagaaggtagatgatagtgagcagtgccttcagattctaagagaaaatgatctccaacacatcttccatacctagctaaactatcatcagatttaaagacagagtaaagatattttaaacagaagagatttacactttttatttactaaatagtctttcttataaaaccgctaaaggctgcatgtcaccaaagtgtgaaaatgaaagattgaataaataaataaataaataaataaataaataacgtgaaagattcagcacacacaaaaatgaagtagaaagactccccaggacaacactgaatggaactgtaagacgacagctatttagtagatctagagagcaattagtacataaaggaggaatgagtgagaggaatcagaaatgaggcctgcatttaagaactagttagaagtagatatatagacaaacacaacttagtgattgtcaattcaaggaagaacaaaaagtttaatgagaaaagaaatctatgtctgggaacatagctaagttggtatcacttgcctagcatgtgataggatcctcagtagaaaagagagaaaggatagatagaggaatggagggatgaagggaggtagagaaatctaatcataatatgctagaagacccagctgtgggtatctacaagatgacattctataagcactatctgttgctcaagcaacaaggagttgaaatatgactctcctgggaaggttaaaggcagaggaagcagaagagaacgctttatttcttataacaggaagtttgtaagtaagtctggaaaatgcagtcacagcactcttaagcataaattcagagcaatgaacctaatgtcaagggagtagctagagggccttgccctgtatagtgggagatggtgctctcaagatgacacaagccattggcttctttgggttttaaactataaacatgggaatacttgacactgaactttgtctaactttgtactaacaaatttaaagtgatgaactttttttggagaaacatcctctgaaacatcacatgggatcttttctgttattcatgtttactggacaaaagcaactgagtcaggaatcggcagtagagagaatagagaggaagacagctggtaggtgagaccagaacccagttagccatgagaccaggggaaagagacagggaacaagacaaccttccaaggtgcgagaatgtatttgatagagatagtaaggagaggaacccccagtgggaaggcatgcttgtctgggctgctctcaacactcccagcctttattatagttacaagcagttcacatggtgaaactacctgccctactacaccatgaacataggcctctgcccatctgccgtccactgggtagcagcatcaggtatacagtagctcctccaggtcctagatggggactaaggccagagtccttgtactctgtacatttgattcctctgcatatattggattgttaagagcaggggggcaggttgcttacagagcatcttcctctgtgaaccttcacaaaggaaaggataaatagaggtcaccagagaaaagaagcatgtccgcttctggagagggctcctagtacctcttctctgtcccagcaggacaaataaaaggtaaactatggtagagcatgcatttagcatgtgtgggaccctctcttgcatctctagcaccaccttacataaattaattaagaatagagttagctcaagttgtataacttgtctttctctgactataattagatgccttcgggagaagcgtctgcatcatctttatgcatttgctctcagctgaagaagaatgactgtcagcagataatacgtgccctgtaaactcaagccaagtccactgggaaagggggatttcctcctaggaggggctgtaataactaaatggccaccatacataacacaccccgaaagtcttaattactctcacggtaacaaagtttatactgcaggctaggagaggtgcccccccacccctatcctcccagtccccgacacctcagcccccgctagacttcctcaccccggtcccagtctccagcttccccaattgttccatataaacaggtacaaagaagaaccaaacaaaagagtgtagaccctatccacccagcctctagggggagaggcttagaacaatgccctgaccctactctagtcccagagtcctttccacttaacatcctagagttttctctcttctgcctcatccataagaagtttaactatctccatgatgagagagagagagagagagagagagagagagagagagagagagaaccaaaactgaaactccatgtcattcaacaagcaccttcatctttctttaaatcgtcagcagagcttctgtttggctgtctcagccctgactcaattaccaagattacaaatcaaatttaagtgagtccacacattgccccgactgggtgacgaaccctgtccctgctttgtgctggaaggttaaaaaattagttgttctgtgattctagtcttgacagttttgacacccctcctccatgcctggcctcaacacatgagccagctttctcccccacacgcctcctttgggcagagcagtctggtgccaggcaaggcaggctcagccgctcttccattggagtagcctgcaggtgcagctgtgcagttgatgctgggcttgctaacctttaatccacatgctcttaaggtagatcccagccttctctggaaacactctgtgtgtgtagcagtatgctagagtccaggagcacctgagcagatgcgcacacagattgcctatcaagagcagtttaagcaaggagtgactggagtcacactggtcttgaggaggagttaagaaggggaggcgaggtactgaggaatgcatctcattgccttctatgttcctgcctcccaggccataaccggcatggccattgacaaccatcttctggcactgagggagctggcccgagacctgtgcaaagagccacctgagatgttcatggatgaaacatacctgatgagcaaccggtttattctctccaccagccaggtacagcctctgcatgtgtggacagggcccaggaggccctgtagtaaaaacattagtgacttggaactaggctttgtctctacttcttttttaacacacacacacatacacacacacacacacacacacacacacacacacactgcacatgtatgcacatatttgcatgtatttaatatgtattatttatgcaaaataattatacatacttacaggatacaatatgtgctgaggtatttgcatgtaacaggtaatagaccaatcaacctcattggcatatctatcagcttagtcatttaaagaacattcaaaacctttgtactactttgaaatatttaagttattattgtcaagcacactgtgccatacaacaatgaagtcaattaaatcctctccactctcaagcctacctcctggcttttttttttctttctaatttatttgtttttatttcatgtgccttggtgttttgcctgtatgtatgtaggtctgtgtgagggaatcaactcccctgaaactgaagttgtatgcaactgtgagctgccatgtggttgctgggatttgaactcaggacctctggaagagcagccagtgctcttaaccactgagccatctctccagctccttttttttttcttttaacaaattttatctttgtgtgtgtgtgtgtgtgtgtgtgtatttgtctatgtgcctatgtgagtgtgtgccatgtgtctgtgggtaccctcagaggccacaagaaagtgttggatcctctgaagctacagttacaggcagttgtgagctggctgcctaatctaggtgctgggaattgaacttgcatcctctggatgagaggcaagcgctttcaaccacagagtcacttgtctagctccaggctctgcctcttaagagtttgtcccttcagtagaatgatctaaaggttcaggacattgattgtctcctaagcaggagtgaccacaggcttccttagccaaggtagacccgctgggaacacatccatttaggggttctaactatcatgcagtactgccttgccatctactgcatgtgagggggtatcccactgtagaggaccctgggatctgaagcctagcaggcctgatttggggatccctcaattaggtcatggggattatggcaatgaatggccagggcaccaatggcagaaaatcaattatcagcctgagatttcctaactggtgttgtacacataccattgtattaaggaccacggccacgcagataggatgacatttttaagtggaaaactgcaggggaggggaggagacatgtgaccacatcaacctccataaaggtaccatacctgcaaaccgctggacatcggaggtgaagggggctgacaaagctgtgtctgggataaaagcccactcagtaatttaattttgtcattacagcagtgggcttgcagacatgaataaatgagatcagaatactacaacataaattcttcgggaaaccatccatgggcgtagagtgctctggaatggcttcatggcctccagccattgcacggcaaatttatctgacaatgcagtgactctattagcaagactaatggcttgttctgccccattaaaatggccagtgccatttcagaaggcctaagagcacagcacctgaaacctgtggattaaaacagaccctgccccacactacactggctcaacaatcctttctacttatccctgaaatcatctaataaaatgaatttggggtctgagttgtttagtggtatctttcccacagtatagtgacatttatggcttggatgctttcagagacacacttttttggtttgtgatccggatcacaaagtcttagccctctaaattcaaaacatcttagacaactaaccacaattccaggtgacagcaggattggaagtgccgggtgctgggtaattgtgcatgggtgggcgggccttggggaggaaatcagaccagccaggcagtactgacagtaattaaggatctgggggaaatcaacagagaagacggccagatttcctccagttcataaattactccctgtgggaagccatctaatggttgggtgccaccagggtgccatttagtaaattagcctgattgccacagtgcctcaaatggcccctagatgaaggaaagccttgactcaggccggagcagcaagtcgccttggaagcttccagctccacaagcagggccaagtacactctggggagtgggttggggtctctccccagataccttgcacctgaatgggcccatctttattactatagctatgtccaatcatgcatgccaacacaatccaatctggtcaagaagcaaatatggaagtcttaagatacaggaactcactgggcagtggtggcgcatgcctttaatcccggcccttgggaggcagaggccggtggatttctgagtttgaggtctgcctggtctacagagtgagtttcaggacagccagggcttctcagagaaaccctgtctcgaaaaaccaaagagaggtgggggggagagagannnnnnnnnnnnnnnnnnnnnnnnnnnnnnnnnnnnnnnnnnnnnnnnnnnnnnnnnnnnnnnnnnnnnnnnnnnnnnnnnnnnnnnnnnnnnnnnnnnnttgtccactgaaggacatggaatatggccagaaaactgaaaatcatggaaaatgagaaacatccacttgacgacttgaaaaatgacgaaatcactaaaaaacctgaaaaatgagaaatgcacactgaaggacatggaatatggcgagaaaactgaaaatcacggaaaattaaaaatacacactttaggacgtgtaatatggcgaggaaaactgaaaaaggtggaaaatttagaaatgtccactgtaggacgtggaatatggcaagaaaactgaaaatcatggaaaatgagaaacatcaacttgacgacttgaaaaatgacgaaatcactaaaaaacgtgaaaaatgagaaatgcacactgaaggacctggaatatggcgagaaaattgaaaatcacggaaaatgagaaatacacactttaggacgtgaaatatggtgaggaaaactgaaaaaggtggaaaatttagaaatgtccactgtaggacgtgcaatatggcaagaaaactgaaaatcatggaaaatgagaaacatccacttgacgagtagaaaaatgacgaaatcactaaaaaacgttaaaaatgagaaatgcacactgaaggacctggaatatggcaagaaaactgaaaatcacggaaaatgagaaatacacacttcaggacgtgaaatatgtcgaggaaaactgaaaaaggtgaaaaatttagaaatgtccactgtacgacgtggaatatggcaagaaacctgaaaatcatggaaactgagaaacatccactttacgacttgaaaaatgacgaaatcactaaaatacgtgaaaaatgagaaatgcacactgaaggacctggaatatggcgagaaaactgaaaatcacagaaaatgagaaatacacactttaggacgtgaaatatggcgaggaaaactgaaaaaggtggaaaatttagaaatgtcctctgtaggacgtggaatatggcaagaaaactgaaaatcatggaaaatgagaaacatccacttgacgacttgaaaaatgacgaaatcactnnnnnnnnnnnnnnnnnnnnnnnnnnnnnnnnnnnnnnnnnnnnnnnnnnnnnnnnnnnnnnnnnnnnnnnnnnnnnnnnnnnnnnnnnnnnnnnnnnnngatggaggaggtatcttcactcaaggccactgtgcatgggatgcgggcagggaccagaggaccgtgtgagagagggagagggagagggagagggagagggagagagagagactcacccaccatgttctagcaggttccttggatgaatgccacagaataggctgtttctgacctatgctcttctccaggtgcccacgaccatggagatgttctgctgttatggccctgtggtacccaatgggtatggagcctgttataacccccagcctgaggccatcaccttctgcatctccagctttcacggctgcaaagagacctcatctgtggagtttgcagaagcggtgggagcgagccttgttgacatgagagacctctgtagttcgaggcagcctgctgaaggcaagccaccaacagcaaaggaaagagctagaggcccaaccaagccaagcaatcttgactactcccactagccaatgtcctacaggagtcagcccctactaaccctgctcccatcccccaccccagcttgttgctgctcccctatccttgggggctcacatgaagctggcatgttaagagagagagagcccctcattatctatctaagtggcctgtggcctttacaactggaaatgagacccagcctggcttggaagcagcctgggtgggctgggagctccctctgaggtctttagaaacttaacctttctgcttctttcccagcaacacccagtggtgcacatggtagctctgccagtggaagaatcgtcatctcatcacatgctatgggcccaaataagtcataaaggcagaggctagctccctccacacactcacatgcacaaagacagcccaagttcatttagaatacagtggcccacatccacaaagacatttcttcctttatcttccatagcacagtcttccttgagttcagattatctcatccagctattcagaaagaaagaaagaaagaaagaaagaaagaaagaaagaaagaaagaaaggaaggaaggaaggaaggaaggaaggaaggaaggaaggaaggaaggaaggaaagaaagaaggaaggaagactagcaattatcttcatttaataatggaggaagctaagtctctggcaaggctgtgaggattgaggctgggttgttggtgaggggctgcatggcagacaagcagtggcaccccctttgggaagacactgtccaacaggcattgcttgagtggttttctcctaaactatttacactgatctgggagaaccaagccttggttgctcttctctatcagaaaagaaactcactgtatttattggctgtatcaaaccatgcactgtgagggtgtaagacccgtaagtggtagacccttggctggagggaacacctcctcccttaggaagggactggaagctggccttccccctccaagaacaaaggagtgtactcatatttatgcaaaggcaacactgagccatggccacaggctgctctgtggggaccctgggaaaggagtctgtcccacgtgtccctaagagatggaaaatgagacagttgtttgaagcagtgatgcattcattgtaaatatggccaccttgtcatactgctaaattgccaaattatttatgaagttgatgtctgggttctatttttataatatagttctagatttatggcaatatgtacattttaatttatagttctgtgctttaaagaaatacatgtatgaacaaagaacagtatattgaaagcattctattcaagatatttaaggactgtaagtctgtattcaataaaatgtaatgtcaaaaaagacaatgtcactgttcctactgaccgatgatataaatgctgtgatccaagttaatggtgcattggcccgtatctagactctgcctcggtgtctgaggatgtggctggaacatcacacaaagccaggagttcaaagtcaatctgggcagcctagaggagactgtgcatctaaaggtaaaattaaaataaatgtcgctgcgccataaaagaaaggcgaggaagccaagactctgctagtgtgcatggcagcccacatgactgaggagagtgtgcgtggcgggccacatgagtaaggagaggcatgggtttcatgtggcatttgtgactgactgacgacagggattcagtgcagcaaagaggctgtaagcctccctgtaagcctttccaaacatgtctgtgggcggcataaaggggagaacctagctaagaaggccaatggcactccagacttgtgtgtcttaaaacctttctagatatccttacttgtaatatggaaatattgaggtcaacacgacttatttctggggtttgggacaagaagttgtgagatgaccatgtttgaaaatggagggggaaaatgtaaagatctagcattcttgttgcaagctcaccatcacaaggttacattggtccaagctgcaagattctctccataagtgagcaatctgtagtgccgagtggagagtcttctaaatagaaactccagagttttcccagcaaagcactgcagcatgctggttagcaagtcaggatgcaggaaagccatatttcaaagagtttacagtttagacttagaggagagaatgaaagtgatacgatttgttcttatgtagcatacacatggcagacggcctccaaacaaccagatatgaaatgcagacaacacagagaacaacaagcagagacaatataaaattatgcctccattcccattggtagatgttgatatccagagaactaggccagtagaatcccttggaatggcacaaaagcaatcagacgtttccaaattataccgtggcagcagtctccttggaggtaaacgccaagggccatcattccctttgtcagttcatcccattccattctttatgtacatatatacatatgtaaatatatttatatattctctgagtttctctctcaagtaaccctttacacatgaggaatatgcacagtgctctccctgggaagagttggttccacatcagatgcaaagacctttctaaaccaactctctctctcttcctctcctatggtgtgttccttccatctcttaaagggatttctgatcctatcctgtccctcgtatcatgggccccagagttctgcctatatgctctgtttctaattcagaagtgatttggccggctgaggtgaatcaaaagggctcctccaactgtgaaaacatattcttaaagaaaaaaaatgtaagctatatacaggcattcagaagatttttttaaaggtattccagcacttgggaagcagaggaaggcagatctctgtgaattcaaggccaccctgctctacataacaagttccaggatggccaaggctgtgtaaagagagcttatctcaaaagggacgggggagatggtgaaggaggaggaagaaagaaagaagaggagaggagaggaggggaggggagagcagaggagagcagaggagagcagaggagcttacatttcaaattacaaaaagaaggatgcccaccgtgagcagtgagcaggagttctaagttcatcatatatgacaggtctgctgtagcttcatgtctgtcactgtgttgaaacaccctgagcagcacagatggggaaagcctttcttcagctgacagctccaggctgcagtgcagtattgttgaggaggcaggaggcaggaggcaggaggcaggaggcaggaggcaggaggcaggaggcaggaggcaggaggcaggaggcaggaggcaggaggcaggaggcaggaggcaggaggcaggaggcaggaggcaggaggcaggaggcaggaggcaggaggcaggaggcaggaggcaggaactttaagcaccacacccacagccaggagcagagagaaagaagcaacccctagatcccagccccctctttgtccactttggatgctcagctagctgtcttcactctaacacagtgtagggcgcagcccagaaaacggtgccattcacattcagggagggtctccccatgaataaacagtcaagacattctgaggacatcctgacaggcttatctgaactagataattcctcaattgagactcaattgtaggctgtggcaagttgacatttaatactagcagcacaatgtccactggcccatccagcacacagtcacttggggttgacaggatttgcaagcccatggagagtgaagaaactatttaatgtccagcacaaaccaaagccccagaggcatcttcatctgcaaaaacgtctaaaaaccaaaccaaacaaaaatttcccatcaccgccttccctcccctccccaccccacacatgccccagacaggggtaagaaattctgctcaaggtggtagatgcaagggaaagaaatacatgaaaaatcgaaaccacaagctttgccctgtgaagatgagaagtctgcatttacataatcattttaaaaggccagactggccggatacaataagatccagagaatcacacacaaaaccacttcctaccttggacacatcaaacactcacagtgggaaactgtctattgcgaatgagctcacagtcagaaacccaaagcagggaaataatgtgacctccgggagagctgcacagaggcaaatggagtcagtaccacaggcacttcagagaaactaataaacagatgtgtttgatattgtcaaagacgctgttgaagggagatgggataaagaactctgatgtacacgtaagggttgaaggaggagcatcctagtttgctttctgttgctgtgatagagactgtggccaaacacaacttagggagcaaagagttgctttggcttacttctctccatcacagtctgtcactgggagaagtcaggccaggaattcaaggcaggaacctggaggcaggaaccaaagcagaagccatggagggatgctgcttactggctcactcagtttacattttcagacaatccaggaccacctgcccggggatcacacccctcacagtgggatagacactcctatatcaatcactaatcaagaaaaggtcccccatgaacttgcccacagcccattctgaaggaggcaactcctcagcggaggcttcctcttcccagatgactctagcttctgtggagctgacaagacaaaacccagcactgggacatactagacagaatgtggggaagcactagtcagggagaaatgactgagaatatgctagcatctaacaaacaattctaaaactcaaaaaataagtaacacaaactttaaaatacttaaagaattctgaagatatcacatcacataacaggtctgctcccagaatgcttcagtgacaaagggtagcatagcttattatgataccaccaaacaatgcaggccgttgctattgtttttgcttactagtcaaaactaggtaagtccctgttgctgaagacacagcttgattaggtctcaggatacagataaatcaagctgaatataagctggaagtgtgcttcctgccggctagctttcctactgttggaatgtgctgtatagtctactaggagagaaaaattatgaatagtcttccagctacataccctgtgcactatatggtaccaatttgccaggcaagtgcacttatgggtaaaattgtggcacaactgacatgggagtatccaatcacttcattgctagatctaagtttctctccacaagaggaattcatgtctgatattataaacctggccaaaacccatcgctagagaggccatagaccctaagatgggaactactaccagtgttttgctaagtagacatggtaccaaactgcctctcaatgtctatacccatagattaacaccactctccaaaatggtcagagaggcttctgtttgtagtttatacagagaataagggaatgttgagtgtttggctgtgaacaaggcaatgatgtcatttcctccaaagctcagggaacgctgtggaagaggatgagggaagagcgtaagaggcagaggaaagcgcgtaagaggcagaggataggaagggtgctgtggaatgctattttctagtcatggcactatgaaagctagccaagcagagaagaagcatccagctattgcactggtggcctcacagcaggtaagttcgcaagatctgcatacgactggatctaccaacattccaccccagatggggagggatctgtggagctataggaacttaaagcttgctagaattgggggggggggggggtggcatattcctcagtgctagatccactagtaaatagttaagcaagtaatcttccatatgtgcccagtcaggcaactgtaattaaatactgtaggtcaaaaacaacagcaaaaagacatgtatgggggagaggagtttataggaaaggaggaaagggggttcagtggaaaggggagacataagaggacaatgtgagatatgaccaaagtccattaaatatgagtatgaaagtgtggacaagtaaattaaattcacttaaacatacctcagagcaaaacttgtgggttatggcaaaagtttttatgggcaaataatatctcaaaacatatcagaaaagaatatgataaaagaattggtgaactaaatataactttgaaaaatagggagaaaactggacgcggtggcctatccctataaatctcagcacttgggagtctgaggcaggacgataaggagttgaaggccagcctaggctacataatgaattcaggccagcataagcaccctaatgagaccctgtcttaaaaacagaaccaaatcagaccatggtggcacaggcctttaatcccagcattctggaggcaaaggcaggcagatctctgagttcaacgtcagcctggtctacagagcaagttccaggacaaccagggctaacacagaaaaactctgtctatctcgaaaaatcagaaaaataaaataaagggggggtgggagtccaataaaaagtaaagtgttttttcaacataatagttttattggttatttggaaattttacacaatgtacgctggtcatactcatctcccggttctcccgtgtccacccccacccttgtacccttctcccagggggaaaaaatgaaggggaagaagagagagctgggtgagattcattcccactacttcacattagtaactgacgaccccagccgggtacagtcggactcaaagctctctcttgactctactaacctccactctttataatttaaagataaatccttgtatatttagatactttaaactcactccttagtctatttttctaaatgagagtgacaatttggcttttaatgaaaatacagaagagggtagcgtaatgtgctcacattaatcacgttttgccatgactcttagctcagccaaccttctactttccttgaatcaagattccagttccaataaaaaaataaaaataaaaaaaacttctactaccttcatgaaataactatcttattcaaagaaaacatattttttagacctagaaaataagacagggatttattttttaaagctttcttttttaaggtttatttttaattatgagtgtaattaattatattaattaactataattatgtttgtagggggctgtgcacatgagtcacagatgctcacaaaggctggggtcgggctacctgctgtgggtgctgggaacttatcttgggtcctctgtaagggcaaatactcactcttaaccaccaagtcattgctccagtcccatagagacctgttttaaattgtctaaaaggctctctcagctgagattgggtggctttaggtggggtctataggctatatttttatttgaaacctaaactcttatagataagaacagaagaattactttgtaatatatattgtatctgtatgtgtgtatgtgtgtgtgtgtgtgtgtgtgtatgtatgtatgtatgtatgtatgtatgtatgtatgtatgtattatgtatgtatgtacatgtttgtatatgtctacatgtgtaggccagaagtcaacatcagatgtcgttccttgggagccatcttagtttttatgaaacagagtctcactggtaagattaagatgtctaactccaatcttagtcagagtgtagactctagaccactccttctgtctgtcttccccatgctacacctttgagtccacatcgtcatgcctagggcttttttatgtgggtgctgagggttgaaacctcatcctcaggtttacatagccagtaatttatcaacaagctgcatcaccccagtgctctcaaaggaaagaatactaactgggttcagcctgttggtttactgtgttactactaacatcgaaaatgtcaagatagaacaaataaaaaccactggacagccccctagcttaggaagacttaggtctacttcacaggcaccttgacccaagatataggttgacaatttttatccaaactctgtaaaaacagcatccaatggcaaaaaaaaaattgtgatagttaatttttgtaatggtttttaataaaaattgaccaattaatagaatcaagaaacctccctgggagtgtaggagttggcctaagacttttaggacaaacgcaatctgctggaaaataattgtaaaacacatactttaaaaaggattaatgttcaagaatggaacatgaaaaatgttatttcaaaacagagaaaacatgtaacctaggagaccagagcttgagaacctatgcttcctggttaagtgaatcttcaaggtgtcccatcttgcagttggtttggactagaaaaaaactagtaggcaatattacattgtacaatgcataaagtaaattttaaaaagcaatgttacaaaataactctgctggagttgttgggagccgcccccacattcgccgttacaagatggcgctgacatcctgtgttctaagtggtaaacaaataatctgcgcatgtgccaagggtatcttatgactacttgtgctctgccttccccgtgacgtcaactcggccgatgggctgcagccaatcagggagtgacacgtccgaggcgaaggagaatgctccttaagagggacggggtttcgttttctctctctcttgcttcttgctctcttgcttcctgcaccctggctcctgaagatgtaagaaataaagctttgccgcagaagattctggtctgtggtgttcttcctggccggtcgtgagaacgcgtctaataacaattggtgccgaattccgggacgagaaaaaactcgggactggcgcaaggaagatccctcattccagaaccagaactgcgggtcgcggtaataaaggttcccgtaaagcagactgttaagaaggattcaactgtatgaattcagaacttttcagctggggaacgagagtaccagtgagtacagctttacgaggtaagtctgatcttgaactttctaacgaaattcaagacagtctatcagaagtaaagtggaatatgtttggccttgaattttttctggtgttaggagcccttttgttcccttttcacatgttatcaagtggttaagatagggcggattctagaggaaattcaggacaagctatcagaagtaaagcggggagagagagtaggaacaaagaggaaatatggtacacaaaataagtatacaggcctttccaagggtcttgaacccgaggaaaagttaaggttaggtaggaatacctggagagagattagaagaaaaagaggaaaaagggaaaagaagaaagatcaattagcggaggtctctaggaaaaggagcctgtgctcatcgctggatgggctcggggagccagctcttagtagctctgaagcaggtgaagaatcctcctctgaggaaacagactgggaggaagaagcagcccattaccagccagctaattggtcaagaaaaaagccaaaagcggctggcgaaggccagtttgctgattggcctcagggcagtcggcttcaaggtccgccctatgcggagtccccgccctgcgtagtgcgtcagcaatgcgcagagaggcagtgcgcagagaggcagtgcgcagactcattcattcccagagaggaacaaaggaaaatacaacaggctttccggttttgaaggagccgagggtgggcgtgtccacgnnnnnnnnnnnnnnnnnnnnnnnnnnnnnnnnnnnnnnnnnnnnnnnnnnnnnnnnnnnnnnnnnnnnnnnnnnnnnnnnnnnnnnnnnnnnnnnnnnnngaaaaccccccgccctgcgtagtgcgtcagcaatgcgcagagaggcagtgcgcagagaggcagtgcgcagactcattcattcccagagaggaacaaaggaaaatacaacaggcatttccggtctttgaaggagccgagggtgggcgtgtccacgctccggtagaatacttacaaattaaggaaattgccgagtcggttcgtaaatacggaaccaatgctaattttaccttggtgcagttagacaggctcgctggcatggcactaactcctgctgactggcaaacggttgtaaaagccgctctccctagtatgggcaaatatatggaatggagagcgctttggcacgaagctgcacaagcgcaggcccgagcaaacgcagctgctttgactccagagcagagagattggacttttgacttgttaacgggtcagggagcttattctgctgatcagacaaactaccattggggagcttatgcccagatttcttccacggctattagggcctggaaggcgctctctcgagcaggtgaaaccactgggcagttaacaaagataatccagggacctcaggaatccttctcagattttgtggccagaatgacagaggcagcagagcgtatttttggagagtcagagcaagctgcgcctctgatagaacagctaatctatgagcaagccacaaaggagtgccgagcggccatagccccaagaaagaacaaaggcttacaagactggctcagggtctgtcgagagcttgggggacctctcaccaatgcaggcttagcggccgccatcctccaatctcagaaccgctccatgagcagaaatgatcagaggacatgttttaattgcggaaagcctgggcattttaagaaagattgcagagctccagataaacagggagggactctcactctttgctctaagtgtggcaagggttatcatagagctgaccagtgtcgctctgtgagggatataaagggcagagtccttcccccaccgtgatagtcaatcaactgatgtgccaaaaaacgggtcatcgggccctcggtcccagggccctcaaagatatgggaaccggtttgtcaggacccaggaagcagtcagagaggcgacccaggaagacccacaagggtggacctgcgtgccgcctccgacttcctactaatgcctcaaatgagtattcagccggtgccagtggagcctataccatccttgcccctgggaaccatgggccttattctcggccgaggttcactcaccttgcagggcttagtagtccaccctggagttatggattgtcaacattcccctgaaatacaggtcctgtgctcaagccctaagggcgttttttctattagtaaaggagataggatagctcagctgctgctcctccctgataataccagggagaaatctgcaggacctgagataaagaaaatgggctcctcaggaaatgattctgcctatttggttgtatctttaaatgatagacctaagctccgccttaagattaatggaaaagagtttgaaggcatccttgataccggagcagataaaagtataatttctacacattggtggcccaaagcatggcccaccacagagtcatctcattcattacagggcctaggatatcaatcatgtcccactataagctccattgccttgacgtgggaatcctctgaagggcagcaagggaaattcataccttatgtgctcccactcccggttaacctctggggaagggatattatgcagcatttgggccttattttgtccaatgaaaacgccccatcgggagggtattcaactaaagcaaaaaatatcatggcaaagatgggttataaagaaggaaaagggttaggacatcaagaacagggaaggatagagcctatcttacctaatggaaaccaagacagacagggtctgggttttccttagcggccattggggcagcacgacccataccatggaaaacaggggacccagtgtgggttcctcaatggcacctatcctctgaaaaactagaagctgtgattcaactggtagaggaacaattaaaattaggccatattgaaccctctacctcaccttggaatactccaatttttgtaattaagaaaaagtcaggaaagtggagactgctccatgacctcagagccattaatgagcaaatgaacttatttggcccagtacagaggggtctccctgtactttccgccttaccacgtggctggaatttaattattatagatattaaagattgtttcttttctgatacctttgtgtccaagggataggcccagatttgcctttaccctcccctctattaatcacatggaacctgataagaggtatcaatggaaggtcttaccacagggaatgtccaatagtcctactatgtgtcaactttatgtacaagaagctcttttgccagtgagggaacgattcccctctttaattttgctcctttacatggatgacatcctcctgtgccataaagaccttaccatgctacaaaaggcatatccttttctacttaaaactttaagtcagtggggtttacagatagccacagaaaaggtccaaatttctgatacaggacaattcttgggctctgtggtgtccccagataagattgtgccccaaaaggtagagataagaagagatcacctccataccttaaatgattttcaaaagctgttgggagatattaattggcttagaccttttttaaagattccttccgctgagttaaggcctttgtttagtattttagaaggagatcctcatatctcctcccctaggactcttactctagctgctaaccaggccttacaaaaagtggaaaaggccttacagaatgcacaattacaacgtattgaggattcgcagcctttcagtttgtgtgtctttaagacagcacaattgccaactgcagttttgtggcagaatgggccattgttgtnnnnnnnnnnnnnnnnnnnnnnnnnnnnnnnnnnnnnnnnnnnnnnnnnnnnnnnnnnnnnnnnnnnnnnnnnnnnnnnnnnnnnnnnnnnnnnnnnnnnnnnnnnnnnnnnnnnnnnnnnnnnnnnnnnnnnnnnnnnnnnnnnnnnnnnnnnnnnnnnnnnnnnnnnnnnnnnnnnnnnnnnnnnnnnnnnnnnnnnnnnnnnnnnnnnnnnnnnnnnnnnnnnnnnnnnnnnnnnnnnnnnnnnnnnnnnnnnnnnnnnnnnnnnnnnnnnnnnnnnnnnnnnnnnnnnnnnnnnnnnnnnnnnnnnnnnnnnnnnnnnnnnnnnnnnnnnnnnnnnnnnnnnnnnnnnnnnnnnnnnnnnnnnnnnnnnnnnnnnnnnnnnnnnnnnnnnnnnnnnnnnnnnnnnnnnnnnnnnnnnnnnnnnnnnnnnnnnnnnnnnnnnnnnnnnnnnnnnnnnnnnnnnnnnnnnnnnnnnnnnnnnnnnnnnnnnnnnnnnnnnnnnnnnnnnnnnnnnnnnnnnnnnnnnnnnnnnnnnnnnnnnnnnnnnnnnnnnnnnnnnnnnnnnnnnnnnnnnnnnnnnnnnnnnnnnnnnnnnnnnnnnnnnnnnnnnnnnnnnnnnnnnnnnnnnnnnnnnnnnnnnnnnnnnnnnnnnnnnnnnnnnnnnnnnnnnnnnnnnnnnnnnnnnnnnnnnnnnnnnnnnnnnnnnnnnnnnnnnnnnnnnnnnnnnnnnnnnnnnnnnnnnnnnnnnnnnnnnnnnnnnnnnnnnnnnnnnnnnnnnnnnnnnnnnnnnnnnnnnnnnnnnnnnnnnnnnnnnnnnnnnnnnnnnnnnnnnnnnnnnnnnnnnnnnnnnnnnnnnnnnnnnnnnnnnnnnnnnnnnnnnnnnnnnnnnnnnnnnnnnnnnnnnnnnnnnnnnnnnnnnnnnnnnnnnnnnnnnnnnnnnnnnnnnnnnnnnnnnnnnnnnnnnnnnnnnnnnnnnnnnnnnnnnnnnnnnnnnnnnnnnnnnnnnnnnnnnnnnnnnnnnnnnnnnnnnnnnnnnnnnnnnnnnnnnnnnnnnnnnnnnnnnnnnnnnnnnnnnnnnnnnnnnnnnnnnnnnnnnnnnnnnnnnnnnnnnnnnnnnnnnnnnnnnnnnnnnnnnnnnnnnnnnnnnnnnnnnnnnnnnnnnnnnnnnnnnnnnnnnnnnnnnnnnnnnnnnnnnnnnnnnnnnnnnnnnnnnnnnnnnnnnnnnnnnnnnnnnnnnnnnnnnnnnnnnnnnnnnnnnnnnnnnnnnnnnnnnnnnnnnnnnnnnnnnnnnnnnnnnnnnnnnnnnnnnnnnnnnnnnnnnnnnnnnnnnnnnnnnnnnnnnnnnnnnnnnnnnnnnnnnnnnnnnnnnnnnnnnnnnnnnnnnnnnnnnnnnnnnnnnnnnnnnnnnnnnnnnnnnnnnnnnnnnnnnnnnnnnnnnnnnnnnnnnnnnnnnnnnnnnnnnnnnnnnnnnnnnnnnnnnnnnnnnnnnnnnnnnnnnnnnnnnnnnnnnnnnnnnnnnnnnnnnnnnnnnnnnnnnnnnnnnnnnnnnnnnnnnnnnnnnnnnnnnnnnnnnnnnnnnnnnnnnnnnnnnnnnnnnnnnnnnnnnnnnnnnnnnnnnnnnnnnnnnnnnnnnnnnnnnnnnnnnnnnnnnnnnnnnnnnnnnnnnnnnnnnnnnnnnnnnnnnnnnnnnnnnnnnnnnnnnnnnnnnnnnnnnnnnnnnnnnnnnnnnnnnnnnnnnnnnnnnnnnnnnnnnnnnnnnnnnnnnnnnnnnnnnnnnnnnnnnnnnnnnnnnnnnnnnnnnnnnnnnnnnnnnnnnnnnnnnnnnnnnnnnnnnnnnnnnnnnnnnnnnnnnnnnnnnnnnnnnnnnnnnnnnnnnnnnnnnnnnnnnnnnnnnnnnnnnnnnnnnnnnnnnnnnnnnnnnnnnnnnnnnnnnnnnnnnnnnnnnnnnnnnnnnnnnnnnnnnnnnnnnnnnnnnnnnnnnnnnnnnnnnnnnnnnnnnnnnnnnnnnnnnnnnnnnnnnnnnnnnnnnnnnnnnnnnnnnnnnnnnnnnnnnnnnnnnnnnnnnnnnnnnnnnnnnnnnnnnnnnnnnnnnnnnnnnnnnnnnnnnnnnnnnnnnnnnnnnnnnnnnnnnnnnnnnnnnnnnnnnnnnnnnnnnnnnnnnnnnnnnnnnnnnnnnnnnnnnnnnnnnnnnnnnnnnnnnnnnnnnnnnnnnnnnnnnnnnnnnnnnnnnnnnnnnnnnnnnnnnnnnnnnnnnnnnnnnnnnnnnnnnnnnnnnnnnnnnnnnnnnnnnnnnnnnnnnnnnnnnnnnnnnnnnnnnnnnnnnnnnnnnnnnnnnnnnnnnnnnnnnnnnnnnnnnnnnnnnnnnnnnnnnnnnnnnnnnnnnnnnnnnnnnnnnnnnnnnnnnnnnnnnnnnnnnnnnnnnnnnnnnnnnnnnnnnnnnnnnnnnnnnnnnnnnnnnnnnnnnnnnnnnnnnnnnnnnnnnnnnnnnnnnnnnnnnnnnnnnnnnnnnnnnnnnnnnnnnnnnnnnnnnnnnnnnnnnnnnnnnnnnnnnnnnnnnnnnnnnnnnnnnnnnnnnnnnnnnnnnnnnnnnnnnnnnnnnnnnnnnnnnnnnnnnnnnnnnnnnnnnnnnnnnnnnnnnnnnnnnnnnnnnnnnnnnnnnnnnnnnnnnnnnnnnnnnnnnnnnnnnnnnnnnnnnnnnnnnnnnnnnnnnnnnnnnnnnnnnnnnnnnnnnnnnnnnnnnnnnnnnnnnnnnnnnnnnnnnnnnnnnnnnnnnnnnnnnnnnnnnnnnnnnnnnnnnnnnnnnnnnnnnnnnnnnnnnnnnnnnnnnnnnnnnnnnnnnnnnnnnnnnnnnnnnnnnnnnnnnnnnnnnnnnnnnnnnnnnnnnnnnnnnnnnnnnnnnnnnnnnnnnnnnnnnnnnnnnnnnnnnnnnncgactacttgtgctctgccttccccgtgacgtcaactcggccgatgggctgcagccaatcagggagtgacacgtccgaggcgaaggagaatgctccttaagagggacggggtttcgttttctctctctcttgcttcttgctctcttgcttcctgcaccctggctcctgaagatgtaagaaataaagctttgccgcagaagattctggtctgtggtgttcttcctggccggtcgtgagaacgcgtctaataacatggagtcacagttcccttcctttctttctccttttctttctctcttgtttcttttttagttggtttgtttttgtgacagggtctcaaatagtagaggctggccttgaacctactgtctaggtcaaggatggacttcttcttcggattctcttgcccccaccccccaaatgctgacagaggttggaacccatggtttttaaaataagaaatgaaaccaggcaatgctggcacacacatttaatcccagcactcgggaggcagaggcgggtggatctttgagtttgaggccagcctggtctacagagtgagttccaggagagctacacagagaaaccctgtctcaaaaaaaaccaacaagtaaataaatttggttttgcagacaaaaatctatggcatactaatttcttacacatctggccttttatctctatacctattactaataatatttagactatgtggaaaattcaattttgtttttaaaaaaatgcaaaatggtataacattgtatcttcagtagtgtgagtatgcatttacttcgctaaactgaaatgtaacaggacaaatcaagttgttatccacaaataagagttacagtaacttaaataggaatggccaatcttccctagaattagaactgtttcatgggaggctatagctttagaatcaaagagggaaaactaaaattagaagataacatctcaagttcagaataaagaaggaaaacacacacacacatgtgtatatatatatatatatatatatatatatatatatatatatatatataataaccacttctattcatctctgccataaaatttctagccagtgatatgcaataagaagaaggcaaaaagaaagattcaattaaggaaatgtaactataattgtttgcacagtgtgtgattatctacatagataacccaaaaggacctacaaataaagtatcaaaaataacaaataaggccaaggtagcttatataagatcaatatataaaactaaatttatcttataaaatcactattgaaaagacatagtttaggagctagagagatggctcggtgggcaaagtgcctgttgtgttagcatgaggacctgaacttacatctctagcacccatgtgaaagctgaaagtggacattgacatctacaacctcaacactgggggtgacagagacaaaaggtttctagggtattacccaacaagccagttgtggtgatttaaatagtaatctcatacattagaatgcttaatgtcttattttgggttttattgctgtgaagagggaagagacaccataaccaagcaactcttataaggacaacatttcattggggctgactcacaagttcagagatttagtccattatcatcatgacaggaagcatggtagcatccaggcaggcgtggtactggagaaggagctaagcattctacatcttgatctgagggcagccaggagagaatacttccatactcgctggagcttgaacactaggagccctcaaagccagcccacacagtgacacacttcttccaagaaggtcaaacctactccaacaaggtcacacttcctaatagtgttacttcccaaagggcaagtgtattcacaccactactcttggtgagtggcactaggagatatagccttggtggtgtggccttgttatatgaagttgtcactgggggtgggctttgagtggtcagaagatcaagccaggccagtgtggcattctcttcctgctgcctgcagatgcagatgtagaactctcagctccttctccagcaccatgtcggtctgtactctgccatgcttcctgccatggtcataatggactaaacctttgaacctataagccagccctaattaaatattttcctttataatagttgtcttggtcatgatgtctcttcacagcaacaaacccctaagacatcagtctagccaaatcagtaaacttcgggtttagtgagagactctgtatcaaaatccaaggtagtgccaggcatggtggctcacaagttgccttctgaccttcataagcatgccacacacacacacacacacacacacacacacacacacacacatacatacatacaattagacatgtgtacacacaaggagaaaatgaactatgaagacagattgatagtaaaatcaggaagaaaatttgtacagacatgtctaacaaagttaataacccagtgagtagtaccccagtgaggggtagatttatcttctaaaagtacacaaagcttagagaaaaaccaagtatttagtatcctagttagggctactattgctaattacggttacattgtgacaaacaccatgaccaaaaacaacttggggaggaagggtttattcggcttactcttcacatcactgtttatcattgaagaaagtcaggacagggattcaaacgggtcaggaacctggaggcaagagcagaggtcacagaggagtcctgctcactggcttgttccttgtgacttgcttatagaacccaggacaccaacctaggaatgtccccacccacaataagctagactgtccctataagtgttatagttctgattggaaaggtgtccccagtacaaatgttccagatcttaagggaaagatatcctagcagtctgaagctaaggaataccacaacctcacactgcacaacaaacctcacacaagagatttattgggaaaacataagagggcaggtgagaggcaggctttatttatatagggtttcttcggggaggaactttccagggtggagatttccagggtggggattggtgggatttcaagtcctgagctcgggccagctcagggattggtaggatgtcaagccctggcattgagagcacctcaggcttcctactttgtaggtcagagcttagtcactctgtccagaagggctgatctgcccaatatgagaggttggagtgttctgtgggcagagcatgatggttggaggtcctcagggatggagcctgtctactcgggtgcctcaaggggcttacacccccatcaatcactaattaagaagataccctacaggtgtgtctgcttacaacctgaccttccctaggcattttctcagttgaggcttcctcttctcagatgactccagcttgggtcaagttgacagaaatctagccagcacagttagatccttccaaaaggcatgaggccgtattgatcagaataaagagtaatgatatggtgtctgcctttctccaagtttgctgtgcccttgtgagttgagtcactctctgctgttgggatgtgctgtaaactgaagctcccagaaaaagccatgcctatgtaaaggattccgcatggctgattggttggtgtgtacttaaccatggatggcagagagtcataacgttcagatccagagccaaaatcatgttgggttattgttagtcctctcagtagtcattcattactaacttccctgtctgacctaatatcttgtcaaatatcatgtaagacctttggaatatgttaacagaagattagcgtccataacatcaacctaagctatcatcaggtaatacatatctgaagcctatcgctgagttctcctgccttgctatcactcgcccacccacagtgcccaccaatgtatttggtgaaagttttgaattataacttccttttgttctgtggccttaaacgtttataaaaccacttctatgtcggaacatgttattgggggcgacctgaattcatgcttctgggccatggttactggtatttggctcagaatcaactcttttcttcctcttaaggagaaagttgggtcttgcactgccagtgtgaagcagtgtactagagagattcagaattctactggcgtcctccctctgttcaccaggatggatgaaccagcatgtgaacaggttgtacacatggggagaattagaatacacaacagtagcatatgttgggagtggaattggtgggaaggagattttaatccttgcgctctttataaagcgtacaaagatttcagctatgtcgatttttataaatgtgtgttccactcacaagaaggcgattgtgaggcttacctaactgccatgaaaaaaacaaataaacaaacaaacaaaagcgaatctcggggactgtgggacaaatgtttcctcctttccctccccaaataaagcaggtctctggggctgcctgcgtccagggatccagtttcctccatggagtggggtttctcatccatgggccctccaggttctccctgtgttgtctgtgtttggggaggatggcaatgaatgagaaagagagtgggggcagggaaggagaagaagggggaaagaggagagagagagagagagagagagagagagagagagagagagagagagaggagaaacagagagggggtgatttaaggtggtcaagaatttgggaggctttaacaaaacaaagacacacaggtatgtctgtttgtatgtatgtataataaatcaatcaaaaacaggtcaacaaagagagaaaacgcagtgttcagtccactatactttcctgcttttcttcatggcttagcaaggttcctggacctcagcagagttaatagaaaatgcaggctgcaactggatggttagcgatgaaactaagcaactctagacagtgcagtcagacacatactttctctaactggcgggagttactcactcacgcaatcacctctaacacttaaccacagcaggtggaaattgagttagtttaagaggctaactctgtgctaagcctggggacttgggacaggaaagccttggccccgcccagcagtggccccgcccacctctctgaaggctggactggcggttgcctagcagcaggtgttagagtccttgacaacctctctcagccaggacaaagcaccatgcctgcgcaagcggtggtgaccttgcgctatgggccctacagcgcagtgggcctgtccgtggagcaccgcacctaccgactgcagggtctgcaaggtgggccaccccactgagtgcctgtttttgagccttagcctcccggatgcaacttgagtcccctacttagaccttctctcctcagaccccagtaaagtacctccttccccaggaagccttcccgggatgatttagcatctccctctggctctccctacttagatataaaagctaaacatgaacataatctgtggatatcctgagtgttaggagaaaatagctaatcccacattaggattggggaagtttaggatgaggaataacaagggacctttgtaagtcaagtggctgcagagtgacaggcctaagacactaccctttgcttgttcatttatgcagctggctccatgttaaacgtgtgcataaactcaggcaggtgttgaactgctaaacaggatatgttgatgaccaagagtcatgcttaaagcctgtcagactagagccaaaggctctaaagtccagaggacacaaaaatcagtttgggaggaggtggtatttgaagttcacacctgaaaggtgggtcagcttttcactgttacaagacatcactctcactaagaaaatgttgtcgagaggtttttgtagcaaatcccacagtatctgtgcttgtaattatgtcagcatgacgtaagctagtgttgtttgggaagactctcttttgagacaatgcctctgtaagattggcttgtaggcaagcctgtagtaccctttcttaaccagttattaatgtggggaggacccagcccgttttgagtggtaccactcatggtcctgtggccctgggttctgtaagatcgcaggctgaacaagccacaaagagcaagccagtaagcagagccctccatagcctctgcttcaggccctgactctgagttcctgctgtaagttcctgccctgacttccttcagtgacggacagtgatgtggaactgtaggccgaaaataaatcctttcctccccgaggatctctttggttttatcataacacttgaaactctaagacagcatttataagagtctgtttcggttgccagcatcaaatgctacaggctatgcgccttggacaatagaaatcctacttccttccatgctggaggctggaggccctggctaggtacggtgatttctggtgtagctctcttccttgtatgctgaaggccactttctctcttgccccaggtactgagaagatgggtacagtagcaaacaaactaatagctcgtctcagagagccacacatcctccttctacattttttaaaataacattttaattactttgacattttgtttgtttgttttgtttttcttttttgttgtgtttgtttgtttgtttgtttgtttgtttgtttttcaagacagggtttctctgtgtagccctggctgtcctggaactcattttgtagaccaggctgatctcaaactcagaaacccacctgcctctacctcccgagtgctgggattaaaggcgtgagccaccaccacccagcatctttgacatttttatacaacatcttttgatcagatttgctccctccagctccacccacagcttctaatttactcactctcatgcctgtttgtttgtttgtttatttgtttctcaaaatactgctagtcatctctgtgctgcccaaatactcttgggtgtaaatctatctcttggggcatggcaaaccttctcagagacacaccccagggaaaactgactcttcctgcagctattaattgttaataatgtcaaggctcagagtgggacttcatgcccatgcccccttggcataccgggatttgtctggcatgagccatcacaactgctgtgagttcacgtgtgtgcctgtcctggtgtatctttacactagttttgctttagtcatctgccacctctgcttacagtctctctgcttctctgttccacagcagtcccctgagacacagcaataaagagtgtgatattcatgtcccattcagggctgagccctactggccagcttttatagtgctgggagtaagggttccttttacacagctgtgaaccctgagagctacaaagtgactggcctggcaagacatgcctactggtgcagtggtggcacctacattatgagaacaactaaagactttctggttagagttaaggaacactctacaaaatggaacccgtacctggaacctttggaaccatggccttgctgggtagtcaggttatatgctctaaagacaaaccttcttcgctttctgctaaatgggaccattaaaccaacttaccaattaaaccaacttccaaagacttatcatgatacccacagatgaggagacctctcacctctcatgagagaagctgcttcttgcaataggtagcaaactgacagagacccacaactggaaaatatacgaagaataaggaactctaatcctttcaaaccaggggttctctgtgacttcatttaaccttagttatagaccaaaagccggagttagaacttaagcacacaaattgaggaaagtataactcagcccataacggtgtcacgttgcaacattaactaaagatcgcagtatcacagaacattgtttgactgttcccagaggtttccaacatcctaaacaatagcactacttcataagtagcaactccaacctccaccgctagtcctcctgcactcaaatcaactttccatccctgtgcatttgatatttaagatgcataaaatccacttatagccctgcactatggaaatggcattagcagaggctgaacacaggggctctgaagatgaggtaacctcctagttctgacacggcctccttcacgagccttcctttccttgttggtaaaggagattgtgaacccctcagtgacatgagtctgacaagaaatgcagagggactagtgagcagcatgccacatggggcaaggacttatttcagaggcagtcgttagaaaagaaggagggggggtctctagggagctttgaggactgggaagcagttcggtctggtagaggatggcagacaacacgagagttgggcctgttttgtccttgacatcaaagagtcagcaaaggtgcctaagtgaagaaccaaaaattagctttaatcccaccacttggaaggcagaggtaggtgaatctctgagtttgaggccagcctggtctatagagctaattccaggacagccagtgctacacagagagaccctgtcttgaaaaactataaataaagacatgccatgatttgtaccttacggtccagttctgaagggggaaattggagaagagaaatggaagaagttgaattattgagagacatcaaaccagtgtgtagaaaccatgttctaggatttagacgaaatgaaggcgggagcgattctgtcaatgagtctggacaccgatgacattcaatacctcccttctcccggtctcaggtcctggcctctccctttttgctgtctctgtggccagaaccttacacccattttcgtccctcctcctctgttatatccactactcagcctgtccgtctacctcagagtctttgttcttggtgcatgttggtaattcaatctttttttttttgcggggggggggggggtgttttgttgttgttttttcgagacagggtttctctgtattgccctggttgtcctggaactcactctgtagaccaggctggcctcgaactcagaaatccacctgcctctgcctccccaagtgaacctccctcttccaccatttctgatcagtcatcttcattgtcaccgtcattgccatcctctatgttgtgtcatggcttccaacctgagctcactgtaaccatcacggtctccttgtagtctgttctcagaaccagggcagggtcagaatatggcttcattgctagataactctggtggttcctagctcacttgggctaaaagcccaagaccttccaaggccatcgggctccttctgacctgcttacacatccactccggccatacctgcaccctcactgaccatggacctctctggggaccccaggagcttacacctggtgctcaggaggaactgtacctgcgatgctttttcctctctttccttcctcaggcttcatgccatcttccctgaaagtcaccttcatgggcaagactttctgaaatctcatgtctctctctctctctgtgtgtgtgtgtgtgtgtgtgtgtattgcatgccttgtacacatgctgacactcgtgtgcaagtcaaaggataaatcgcaggagttgattttttccttctaccatgtggggtactgggtatcatactaaggctggcaagcttgacagcaaatgtctttacccaccaatccatctcggtagctctgcctccttcctcctctatccccctctgtccttcttagtgttcatagatagcacagcactgttcttagctccttacctcacacacacttggacatactcttccgtatgtcctatctcttcagattcctatctgtcctgttccctgcaggggcccagttcctaggacctggttcctggtatatatatgaaaagtgttgcaagactttttctggggcgatgtggccaaatttctattcaccccagatggggcactaacagcagaccgaagaaacaattccacccatgtctaacttggcaagccagtgagcttactggagttgcccacttacaggagcaggaatgattgaaaggcagctgcatcacaggaaaggccagtctcacctgggcaataactcacaagagctgtgtccctggagctccctgctctgcttcctgctagccccattgaagggtctcctctcccctagccatggctagctgcttagatgacctctagagtggggtttcctgataatgttactttctaaacattccaggaaagaatgtatcaaatgtgaggacatagctactcatcagaaaatatagaaccatatgctggaggaagactggagcaggagacagaaccaggcagcgggcagaggtgttgcctaaggacagagtgccaagggccaaaattaggtagtacagaattggggaaatgtagacctagtagcagaaggcgtgttagacgggatttcagaagaaacatcccaaactgctgagctccagctgtcttccagagagagagagagagagagagagagagagagagagagagagagagatgcatttacaattgtgggtcatgggtcatggaaggattagagaatgaatattctcatctggttccagttgaaagacaaattggacagtgagctcgctaggagggcaacttgggagtgtctataaaatgtaacccacacaacagaaaataaatgtttcatttctaggttctgccttcactgcaccccacccccacccccgcaggtaacacaggtggcatattagcaatgttttctgctgcattcttgatagaaaaaaaaaaaaaggaagcaatcagaaactgcaatggctcaagacgctgcaacacatctggcacctgacagggatggtggaggcctgggtgggtgagcacagcactagacaggtgtagagcctctcccgtgtctcctgcacatctctctccacttgagaggacagatgatggaagagaggcataaggtaaagttaggctggtttttaaaacgttgtccttttctatgatgtctaagatttttacagaatcccgagtctgctttacatttgtaatctgaaaatcttttagatgtactttcgatctcggaaaaaataaatgtcctaaagaaagacagagaaacaaagaaccagtgtacatctgcagtcctggcccttggagagcagggggtggaggattaggagttcaagccatcttgggctgcctggggctctgaagcagggaagacaaaagaagaggaaggacaatcagtcagtctgggtgacaatacctgtgatcccagcgctcaggaggctgaggcagaaggatcatgagttctagggcatcctggcatctacaagattccgctaacaccctccctcccccaacaaagtaaaaaagtggtgggggaaaggaagggtggaggacagagagggaggaaagcagacagggatcagagaggaacagagaagctcggtgaactactggattcgtggttctctggccttgagaggcaagtagcccttaggtacagaactcagtggagccagaagctgctggttcttcttggggaggaaatggtatttcgaggaagtcctggggtgcattttgatggctgtggaggtttgtaaggcatctgcgggtgggtgatttgtaaagtaagctgtgtacaccggtgcttgataacgcatctaataacagctgccaacatttacaaaggacctggtgacaagggccaaggtgttaatagcaacaaagcagggaacatttactcccccgccccacccccactctcccgcttcagacccatcagagcgagcagacctacttgcaggcactcctctgtagtatctgcttctgaattctgcgtatgacttttaaaaatcatagcgctttatcgtttcccgaagccccgctgtctttggaaggatgcccgatcttttctgaacgtgccatgccctaagcaatctgaacactcttgttctttattattcacgaattataatggctcggcaaaaaaaaaaaaaaaaaaaaatctccactaaaccagtgcttaaaagaaccctaagtaattgccctggtcatggtttctcctcaactactgtacttgagcctgccaaacgacgccctcaaaggaattggaaggcactggaactgaccattaaaaatggaatccatctttatttagtcaaggcacccaagtgccatcctcccatcgccagcgatgcattagctgcactcattaatggtcactgacattctgtctgctctgagtgaaaggaaggaaagccatccgtcagtgtaccagcagcattgacatcctccacagatggtgcacagctccaccagctcagggaggacagagcctctcccctgtccctgcactttatccggattccctgtgaggaatgaggtgccacttcaaagaggtgggtgttctgcgggtggcttagcgcctctggctgatttatgctggagtttagccactgcctgtgcatagactttgtttcggggaacatatttatctgacctttctttgaatagacaacccagtagcagcccaggaaactatgtccccctccgtgccaagcggtggcatttggatgagctgcaggaattccgggggggggggttgttttctctcatcccttaagccatgctacagtcaggttcactacctcctctctgacaggaagggatagaagtcctgaggttgataagtgtgacagactctgaggtagttgtcactagagtacaaatcagagaggtaaccaatagccccaggggaaagtggtggtattcctcaccatgccgagtttgctgctttggggagcctgtgctgaccccaggttcctgcaggaaggtcaagagacctgcccttaaagagttcaggtgcttgtgcctggcaacccctctagggagagaagatctcttcttgtctgcttcagttgttcttgggagccctcaccattcccctctcgactctatggggtggcttgttttgtggaccaaatctggtttcagctacaccttatcctggaagagtaatgctgtctctataaaatactccaacaccgccgtgtataacctgagtttcagtcagatgggcctttcagggacaagtcgtgggcagctgggaagtgcttgcctcctgaggtctcttgctggatcatctgcctagtcgagtgtctcctcttctctcagagctcctcaggccttagaaagctaacctaggaatctggagcagagtgacagctagactcccgtcccacccctttcaaattccagtccactccccaggaaggtctacagactatgcaaagcctaagtcctagaagccacagtgcaccttatcatgtgtagctacttcctgttggggagagcggtgcaatgggcaggggaaggagaggccagaaattcctacccttggacttacatcacctgatgcactgtccttccaaaccagctggaccacttccagttaaacaagccactgagtgccctctgtaaagatgtttaagatcaagacactaaaacaggatacaatagcacaaacaagccaaagaaatgnnnnnnnnnnnnnnnnnnnnnnnnnnnnnnnnnnnnnnnnnnnnnnnnnnnnnnnnnnnnnnnnnnnnnnnnnnnnnnnnnnnnnnnnnnnnnnnnnnnngatgggtcaattagggccagcccggggtgcttggggagtgaattgtgttaatggagaccctcacggagtctttctcaagtttctttccagaagtgaaatccaaattatgcaattaaaaggctcccagctggggccggatgtgcttgaactgattgaaggatgagggagtggacacaacaacgttcggaaacagcgattgtctctgtaattaaatgcaattagctgacaaaaatgtctgttcttcccctccgaaaactgattggaatgtaaaaaaacacgaccccatctgatgccttgttccttctaacccaaaagctcacccccagcaggccgaatgctaaaggtgagcgatggcgcaccagctctaggatggctggggccatgagagcatcaggggaaccggagaagatggctggggagactaactgtagggggctgcctttcccgcgagccacagccgagatggagtgggcggggctgtagtggagacttgcctagccagcctaaggcctaggttcagagggggaaaagaaaaattgtctttacaaattacccgaggctggcttgtaggaaggagccgcagcgtgtaaatgataggcaagcctcagactcaaaggtgagattaataaatctgttttcttaaaagttttctgattattatagacattgtgggaaatgctgagagagtaagaaagaaccagggagcttactttcctggctcgttttcttgaattttgagacaggctctcattttgtagcccaggctggcctctaattcaatatcctctgcctcagtctcccttatagctgggattataggtttgccaccacacaggcctcttctttcttacatacatagcttaattaatattgagtatatgttcttaatatattatacgtatttatatcctgatttttgttcttatcacaaatatcactatttttaaaaattccttttttcttgttttgcttttttcagacaggatttctctgtgtagccctgcttgtcctggaactcaatctgtagaccaggctggcctcgaactcagagatccacctgcctctgcctcccaagtgttgggattaaaggtgcacacacacaccccaccaccatcaccaccaccaccacccccggcgtttcttcacttaggcacctttgatgccaagggcaaaacagacccaactctcacgctgtccgccatcctctgccagaccgaactgcttcccattcctcaaatgtcccgagagactaccacccagctagctgtcactatttctccatatgtatttacatattctgtgtatgtgcacgtgtgtgcgtgcacacacccgtgtacatcatggcacacatgtgaacacgagaggacaattgaagagttggatttctgggactgaattcaggctgtgagtgtcagcagcaaacatctcacccagtgagccatctcaccagcctacagctttaaatttccaaattaaactctcattatgtacacatagcactgcttactccgtcagcctcttattatcagacttgtaaactgttcatagaatttgggtattatagaaagaacgtcttgttgaaaaaatttgcctgtatttctgacttttccttatgggatttcttttaagtagaatgttcttgaaacatgtttttgaaggtctttgcttccgctataaattgccctctagaaagcaaccaaattctatttccatcagtgggaaaagaagtttctggatcctgggtcacctctatactgagcactgcctccatgatgcagcgctgtggggcacccagcggccacttccaagagatggaatatctcctaatagttcctcctccaggtctgaggaaattcacaagcaaggcctgtgtcacttgagggtctgtctttgctttcctgagactttaagaacacatggaggccagggagcagctagggcccaccaggtggttagcttatgaccgtgaacaaccggggaggagacaagctgccgacatccgtgaggacgtgggcgtaggctaatgtggaatctatccatgtcacacatgtccctcttttctttccagctgtgttggccaaagacggacatcagatcatcctggagcagatagaagactggaatctggtggagcttgtggtaaatgaggagacggtctttcaatgtgatatccaagagctggagtttggtaaggctgtggagctctccctagcccttggtctttgctgagcagcctttgccctctgtttctagtggaaatggtcagggagccatgcctagaatcaaactggggttctttttgcatttcaaactcacttcaagaggcctggtccctgcagcacatgaaagacagcgtgtgtgtgtgtgtnnnnnnnnnnnnnnnnnnnnnnnnnnnnnnnnnnnnnnnnnnnnnnnnnnnnnnnnnnnnnnnnnnnnnnnnnnnnnnnnnnnnnnnnnnnnnnnnnnnngcacacactacacacatatcctaacacacactcacacaaacacacacacaccacatataccctgacacagagaaacatacaaatacacatacacacaccaaacacacacacacaccctgtcatacacacaccacccataaacaacacatcacacaccacacacacataccacaaacatccccccacacacacacacatctggtgcactgttgtgctgcctaacttcttcaccaaacactgtagacagatgaggaaagaaaagaaagctgagcccagccttcagatgtaattggaagaaaatgcggttttgtgtttagtttccatttttcacattagtaatgtatgtcttattattttctttcaacatgatttttgttctatttgtttactttatctagatttctgagacaattagagtcagtatattcacaggatatgacatgatcagcaatagtctgcacatttctttgccctgggacatttatggccctatagactggcaccaagtctgcctccccgtgcctaagagcaagagcttcagggctccaccaaaactgctagaggctgcttaacagttcacatgcctgtagccttcggaaatacactcctagtgaaaacccaaggtatacttaatattacatcaatttgtatttaaaactgtccaaaaagtgttatctatttttctagggggtgatggcaaactagacccactgtgtgaagaggccaggatcgctgtgctaaatgccttctgatctcgtggagcagacagaagaacaccagctatgtcctccagtctacagtacctgcaaaaggggcttaggagccacatggacggtgggctctaccagttaggacatggcgatgccacctgtccactagtctgtccagtctggaattctcatctggctgcataggcacccacaaaaataataaaaactcctccctggcagcgtctcccagtcttagcccatagggagagccctccaatatcaggtgcactggatctgaaggaaataagaaaatgcaatctaataacagagctccatcccctaataaagcaccattgccagaagcattagacattgcattccgaagcctgccaagaaccaggggcaggtgaagttaacgagcttccaagtagggggtgggaatgagggctctgaaagtctggaccgaaccagtgtaaatgcagaattctgaaacctgaccttctgtacgggtttatttcttgttcttactggaatacatttttaattgctagtataaaactatgtgaaatcaaatctttacttgtccccgctgcaaacaagaaaagcatctgccgccttttgtgttagccagtttatcaggatgctctaaaggaggcaggaggcagtctggggcagactggagtggctctcgggctctctggtggagaacagaacctcatgaaaaggagctttagtgacaggcaaggtaaaaaaggaatcagttgtgaaatgatgtgtgtttgctttccaagtcctatgctctgcgtgtgtgtaagaatatgtattaatttatgtgtgtgtgttgtgtatatatatcactgtatgatggtaacatgaggctgtttgaagaagaccgttcaccttagagaagatcccagtggaagtcaggagactatgcagaaagaaggcactctcatgccctgcagagaatttataccaccttggagtctgtccttcccttcatcccaggaagcctcaggtcccctcgcatccccaaattacgaagcccaatagagattccacgtgctgacttggagccttggcccaagattcatttgtcagagtcaatccagattacaacgcactcagagaaatatttaatcctccccttagcaagaagagcaggctctgggacagttcccttcccatgcctgtcgctggttttcacggttccttagtccttagtgagaggccagcttcagttacaaaatacgtagcacctttctttgcttcaatatagaattttagaggaattattttcactaaagaaccatagaaagtacatcataatggcagagtagaattcagcatcattttgatgtacttcacgttagaatttcttctgtttagctctagatagtcacagaaataaatgtagatggaacatgactttgcctggtcagggtcacagtgtattttctccttttaccttagtgtcttatattgatcttgtccccctgtggctgagcatttactaactgtccaaacactgtgtctaaatcaggggtgttcctcctccttgcatgtgtgtagaagttgcctttgtccgttttgtgttgtggctgtaactcagcctctggccctaggtaatgcatgaagagaagaggtttacttggctcataattctgtgtctagaaagtctaaaccgtgtgatgttggtgtctggtgatgtatcattacatggcaggtgatgcccactgtgagagggaccacgagacaggggcctctaagtttgcttttacaataactcttgagacctgtgaggccagattcagtcccctctacaagaatcagtcatgactctgctacctcctattaggtcctgcctctcatggattccaccattacacggcaggccaaacttccaggacacaaacctgaaaagaaaaacctattccaaaccctnnnnnnnnnnnnnnnnnnnnnnnnnnnnnnnnnnnnnnnnnnnnnnnnnnnnnnnnnnnnnnnnnnnnnnnnnnnnnnnnnnnnnnnnnnnnnnnnnnnnnnnnnnnnnnnnnnnnnnnnnnnnnnnnnnnnnnnnnnnnnnnnnnnnnnnnnnnnnnnnnnnnnnnnnnnnnnnnnnnnnnnnnnnnnnnnnnnnnnnnnnnnnnnnnnnnnnnnnnnnnnnnnnnnnnnnnnnnnnnnnnnnnnnnnnnnnnnnnnnnnnnnnnnnnnnnnnnnnnnnnnnnnnnnnnnnnnnnnnnnnnnnnnnnnnnnnnnnnnnnnnnnnnnnnnnnnnnnnnnnnnnnnnnnnnnnnnnnnnnnnnnnnnnnnnnnnnnnnnnnnnnnnnnnnnnnnnnnnnnnnnnnnnnnnnnnnnnnnnnnnnnnnnnnnnnnnnnnnnnnnnnnnnnnnnnnnnnnnnnnnnnnnnnnnnnnnnnnnnnnnnnnnnnnnnnnnnnnnnnnnnnnnnnnnnnnnnnnnnnnnnnnnnnnnnnnnnnnnnnnnnnnnnnnnnnnnnnnnnnnnnnnnnnnnnnnnnnnnnnnnnnnnnnnnnnnnnnnnnnnnnnnnnnnnnnnnnnnnnnnnnnnnnnnnnnnnnnnnnnnnnnnnnnnnnnnnnnnnnnnnnnnnnnnnnnnnnnnnnnnnnnnnnnnnnnnnnnnnnnnnnnnnnnnnnnnnnnnnnnnnnnnnnnnnnnnnnnnnnnnnnnnnnnnnnnnnnnnnnnnnnnnnnnnnnnnnnnnnnnnnnnnnnnnnnnnnnnnnnnnnnnnnnnnnnnnnnnnnnnnnnnnnnnnnnnnnnnnnnnnnnnnnnnnnnnnnnnnnnnnnnnnnnnnnnnnnnnnnnnnnnnnnnnnnnnnnnnnnnnnnnnnnnnnnnnnnnnnnnnnnnnnnnnnnnnnnnnnnnnnnnnnnnnnnnnnnnnnnnnnnnnnnnnnnnnnnnnnnnnnnnnnnnnnnnnnnnnnnnnnnnnnnnnnnnnnnnnnnnnnnnnnnnnnnnnnnnnnnnnnnnnnnnnnnnnnnnnnnnnnnnnnnnnnnnnnnnnnnnnnnnnnnnnnnnnnnnnnnnnnnnnnnnnnnnnnnnnnnatgtgcctcagtgagccagacatccaggtgccttttaatacttttaaaacaccaattaattaatcacatctcaaacttagaagatgacaaatcaaggccctgttagtggccccacataaagaaagcaagcgtcctttttagaataaaatcaaaggcatggttctgtctcagcagttttaaaatgaaatttagagtttctaagctttttcatttaaaaaatgttaatgactagatttgggggtgaaggggctttccaggacttccaggactgctgttagaggccctgctaaccacacctattttctcttattagttctatccttgaaatctgtgaccaacaatcctgtgacttcgccatatatgggagaccatcagctcctgagtcagtgacaaaaacatttcagtagtgtgaccgacagaagactgggaagagacccttgtaccctctgaggcttaattcttccttggacacatctcccagagtaaccccgggaagtgatacccaaatgattctccttagacactaacgtccagctgctgcctttgtggttggttcagtgtttctggaaggcaactcacagttgatagcacgcatgctccctgagggggccaagttttcaggaagagcacaccagccagccagatccaggggaaagacaagaaaatgctgacacgggtgtctgatggggcacagagggataaccttcctgaattgaacatttaaagggaaaacagcataaaatggtggtgtagccaggtgctctcagcttggctgggaacaagtgtctcgagtcacaggaaacagatcaggggccttctccatgtaagctcacactctggagctacaaagcctgggtgacagtagccggacagagccaagctcatctgagacaataggccaaacagcccagcaacctgtgagggtggagagagaggtatgtccaggctctgggtacagtcactcagttccaatgtcactcttgctttccgggaggaaacaggtctggggctatgaatcttctggaactttccagaaaggctacaagnnnnnnnnnnnnnnnnnnnnnnnnnnnnnnnnnnnnnnnnnnnnnnnnnnnnnnnnnnnnnnnnnnnnnnnnnnnnnnnnnnnnnnnnnnnnnnnnnnnnaaaaacaaaacaaaaacaaaacaaaacaataaaaaaaacccacaatgctgtttgaaaagcaagcacgcccatggccatcagtagtttgcgcaaggctgcagcaggtgtgcctttggtctgggcatcattgtccttccccataaattccagggcctctcttcccaggatccccttggcagctctatctacagtggggctgtatgtaaactactctgttccagtgaaacctttgacccaatcatttacctatgcaaagaaacagcagacagctttctgaaatgacactagagaggctgaattctctctctctctctctctcacacacacacacacacacacacacacacacacccctccagatgcagaagtgcctcttgagagatactggactgcatgcatctgcatggtcagagacctttgtgaaaatgatgctcccacttgagtggcccttcagaggaggtcaagagcagacacccagaagttgaaaaagaaagctgagatacaccagttaacaagctagcaggaaccggaccagactgtaccagtgatattcccatcatacaatactaagcttctggctgcccggaaggcactgatattttggtctcctgtaggcagtctaagccccttttttacctgatggttgtagggtctgggatgggattgaagaacctgcttttgtgacgagtgtttcagctgatatagatagaacgtagactatccacattctgagagagttagcatcagacatggggaagaccatgtgctgtagttagaggtgggcatgtcagcatgtgcacacgtgcagacagacagacagacagacagacagaaacacacaagggaaacagttgcttctatcatcctaggaaaagtggaaaggagaggggaggggttggaaagcagacaggaaggaagggaggaaagaggaccacatatcttggcactatgtctaggttaaatttaccataaagttaaccactagcacctgccactaatgaccagtttcaatcatgttgcttagatgttccctcaacaggctgctaaccttgatggctcttctagagcacaaaggcagaaaaaagagatttttcattgcggagcttgtcatgtagagaagtaagggaggccaccaagcaagccccataatactcagaatgtgatgccacaggccagaagtgtctgccaggttgtacctggcactacagggatggagtgggggaagggaaggccgactcagaggctgtgtgacaggtgaccggagacctaaagactgtacaagttctgttggccaaaaagcacagtgtgggaattccaggaagaaacagagagagaacagggaaaggaaccatgagaaacatagggtatcctgttagtgtgtgtggtttgagtgaggatggccccataggctcatatgtttaaatgcttagtccccagttggttggtgactgtttaggaaggtttaacaggtgtggccttcttggagggggtgcgtcactgaagtgtgcttttaggttgcaaaagtccatgttatagcagttgactccctctttgcctctgtcttagttagagtttcactactgtgaatagacaccaataccaaggcaacttttataaggacaacatttaattggagtcgacttacaggtttggaggttcagtccattgtcatcaaggcaggaacatggcagaatccagacaggtatggtccaggaggagctgagggttctacatctttatctgaaggttgctagcagaataccggcttccaggcagctaggatgagggtcttaatcctctcctctcctctcctctcctcnnnnnnnnnnnnnnnnnnnnnnnnnnnnnnnnnnnnnnnnnnnnnnnnnnnnnnnnnnnnnnnnnnnnnnnnnnnnnnnnnnnnnnnnnnnnnnnnnnnnnnnnnnnnnnnnnnnnnnnnnnnnnnnnnnnnnnnnnnnnnnnnnnnnnnnnnnnnnnnnnnnnnnnnnnnnnnnnnnnnnnnnnnnnnnnnnnnnnnnnnnnnnnnnnnnnnnnnnnnnnnnnnnnnnngtccctctccctctctccctccctcccttctctatgccttgtgcttgtggatcagacatgagctcccaactgctcctctagtaccacatctgtctgtctgctgttgtactccctaccgtgacggtcacgaactctaactggagccatgagccccagattaaatgttttcttttataagttgtcttgattgtgctgttcagtcatggcaatattaaagtaactaagatagtatgtatatagactaaaaggtaggccagtggtaggatttaaatgtcattaaaaaaaaagccataatgcatctgggactcagttcaaagtacagtagtcagagcagcttggaagtctaatgcaaagcccatagagaaagggacatgatgcagaatttgaaactggttctcattagctttctctgttcatcatgtgaccacatcagtattagggcttagccagctgctcatccgctatcccagtgccatcctagtctcctttaagacctcagatgaaagagttacatactgaatacatcctagggaaggtctcagcctggctcccttcctcaggaatcacagctccccagcctccgttcactggaacacagggatctactgctctttatccaaagcaaaaggcttataaatgaaaatgtgcattttaatacacagatactgtggaaagatgaacaattttcaagtacaccacccagattctggggtttttcctggcttggggtttgtgtgaaagatcagcaataaaacccgcagtttgatcagaagtatcttcctgcaaggtagaagaacaagcccccccccccccaagccagactgactctggacaggagtgtcaaggaccgtgggcaccatggctctaggggaccttactgcctggctcacctccagcaggtttcatgggctctggtttttgaggccactgctgctgcccctgtcctgagctggaagtagttccttccgcacactgacccttaagtctaagagtcaatacagaccttgcagaagagcagacctgtgaccacatctcagctactagcaagagcaggcaggaggcccagggatgcctggtcgtgtttggtgagtcgtgtttgctcaagaaccttttcagcctagccacttggatccacgcccagcagagcatctactctcaccctgaaggagtgttccaagctcttccgagctcttgggaacctggccacaaacgtgctgggtgctcatgggatgtcccctacagctcacactattcagggaaaaaacgtccacatttagggcttctgacttgagatgagcaaagtggttcaggcttgggaatatttctacataattctctcgtcctttgtcctgccacgtgcatcaggcagatccatcataaaataccaactcttcctaagaagagctatgaatctaatgttataccagtaaaaatgccagctgggctgtttgaaaacaggacaaactaattacaatgttcatattgaaatattatcaagcgtttaggacccccaatatggagtagacctggaatttgacccaccgaggaatgtggcatatggtaaaagtccttccaatcactcaagaggagtgcagtttgttcaaataatgcgtaggaaagttggacagcaatcctgaagaaggttggattcaaacctagtcttactctggaatgcgttccagggatttaaatgtaacaaacaaaaccgcaagcctgcaactttgtagacttagaatgaagaaagcttttctttagtaagaatttgtatttatttgctttctgtgtgaaggaatatgcatggtacagacatgtggaggtcagacatcaacgtggagagcccgctctctcctttcaagtgctaggaattgaactggggccactgggcttgctcagcaaatgcctttacccacggaaccaccccaaagttcccctaaagaaggctcttcaaagtatggctcaaaacccccaaagatgaaaaaataattgaataactgattccataagaaataaaacacagttttttataaaatagtaaatcacatcagaagctaaaaatacatatgggaaaggatcttttcaactcatgtttttaatcaatacaaggctcccacaaatcaatttttaaaaatcctatagctaacacagaagaaagacaaaggaaatggacagaacattcacagaaaagaatgtccaaatggtccttcaatagaaaaaggtgttttaaccttacccataataagaccattgcaaatgaagacagatgccagagcagagacaacgacactgtctttgagggatgtggaagaaggcatttattcctgaacagagcagcgtgagttaataaaatattcgcataacaacttggcattactcatcataaaattagcgcatagatcctttagtttagtattagtccctttcagaagtgtatccgaacagtatccacatccagatgtgcataggaacaaaacacatccagatgtgcataggaacaaaacacatccagatgtgcataggaacaaaacacatccagatgtgcataggaacaaagaaactctgaaacgtggtttgtggtgctgaagagatggctcagtggttaagggcacttgtttttacagagggccggggtcgggttcccagcacccacatgttgacccacagctatcgatagctccagcagatccaactgcctgttgtggtctgtatgagcaccgggcatacacgtggtacacatacatgcatgcaggtaaacacataaaataaaaataaatatttttttaaagaccatgaatcatataagtctatttatagcgaaaaaaatatcaactgaatgtatagggacatgatgtagattaatgcttgtgtaaggctgacacaagggtgctaagaagctaaaaattaggggggttattttttacataatgaaaatgtcctgtaattaattgtggtgatgcttataccagtccatgaacatgctaaaatccatagacctatgcacttttattgggcaaatgtatatatatatatatatatatatatatttacacacacacacatgcacacatatatatacatttaaagtgcatatatatgtgtatatatatatatgttgatatatataatcaacaaagctattagcaaaaaaaaaaaatcagccatgccccccctttaagctatttgaacaacttgaaaatgaatttgtttcttatacttttctatatgttttggctttgcaaagatgtcaatgtcataaatgtgttaccctacactggcgtatgtggtaggtgtgaaaggtgtgcacatgtgtaggtagatgggtgtgtgttgtatgtacacaaattcacacaggtaaaagtacacttggaagaatattctttcctggagaagccaagagcaaaatgaacagggagatcaaaaaggacactccccttaactttgtgcgagtctgcgatgccgtaggagcacatgccctttatgccctttggtttgtatacaataataaaaagagtaaaacgggggcggggtgggggtggtagtgagctcctttggagctggaaaaatggctcagcagttaagagggcaaaccattcttgtagagcacatgagatgggttcccagcatgggccttaggtagctcaacagctgcctgtaactccagaggaggccgacacctctgtcctccgtgagcaatgtaactaacttcatcccagtctggtccccgtgcctttgctaccatgatccactgtagccctcaaaccagaagccaaagcaatcttcccttaagttgctcattgtcaggtatttggtcacagtgacaaaaatggaaactaatggtcacaacaatagctaactaagacaaaaatgttgcaagcatctgttgcaaagtgctgaaactgagcaggcaccactcacaccccatgggggcagtgtggcagtctcgctgtataaagagtgttggggagtatctaaatgtcgccatggaagtgcaaagtacaaattgttcctgacagttacttggcatctcctttgggggagcagttgacttcttcggagaaactttccctcaggtcctggtgtctggaagagctctgactgagatacgtggagacttcactctcaagatgcttcagccacagtggagggcagtggctgtctctctttgacttttttaaagcaatagtcctgttgttttaagaattcacctctcctccccttggtctatgggactccatgccaccctgccgctgctactgactcatgcctggccaatcagagtaggacatctcataggaccgcattttcttaggcatcttgaattaattagatcctgcccattggaaccaatacgattttccctagaaccacttccaaacgtaacactgcgagtactcagcaagatgctggagggctaacacacctctcacacaggagccaacagcttcctacagctcctagcatgtcccattcaagtcttggacttgaatcacccacacattccacatcactggctactgatcctcccctaagtgggacatcttccaatcagccaacccacccagagacccccatgtaccaagcagaatttctgattccttggggaggaaagacagagtttctctgctacactcacagcgagtgttttaaagatttatctatttttattttctgtatatcagtattttacgtgtgtgtgtgtgtgtgtgtgtgtgtgtgtgtgtgtgtgtgtgtgtgtgtgtgcagtgcccatagatgccagaagagagcatcagatcctctggaactgtagttacagacagttattagctgccatgtgggtgctgggaacagaagctgggtcctttgtaagagcagcaagtgctctaaactgctgagccatctctcgggccttcaagccttaccatgtggattccattggttagagataacagttatgtgtctattgggggcacagtaaaatgttgctcaggacctgcattcctcatttctttgtgatgaccacattcaatattgaatcttctgaatatgctaaaacttctcacagccctctgcctgccagaggcagagtcgactgaagccaggattggctagatgcagagtcaagcctcgaactcaggtctctgtaacccagctggagctaggaagatggcttgggtgagcagggggctagtgagtgacggagaacacaatcaggacagctgaaagtacttggactctcccaatttgatgtggaggtgttagcaagggaacaaaggtgctgtggggctttctccctgagagaaaacaatttgtcactgtgatgtgcttgggaaagcagagcccttgcccagtacttggttcagtttgtcacagtgattgttgctattttccagacttgatcagagatgagctggccccatccaccacggatggccaccatcatgttcaaaacacacatgtcaacaggctacatgatagtccccaaatccctttccagagcaaaaccatctggtcacacctgtgtctgggaaatgtttcagaggttgttcatgttttgtcttttgatgggatggtgagccagaaaaaaagagaagctcacacccttaactgttgatcacccaatctgcatggctccaggtagagatgccgaataccacctctctagatgactgaaaatttatccagcctcttatttctccgttttctcgcctataaaatggagcagtaataacactgccctccttgagttcctccatagaagcacaaatatatgtatttgttgaaactatggagctgtggctatcctggagcttcatacatagaccaggctggccttgaacttatagaaatccactagcctctgcctcttgagttctaggattaaaggcctgcagcaccacacctgccccaccccacctacctttttttaagtagcctagactgtatgattcaaatcaccagtgaagttatcagcgggaatggaggacggttccattgtcccctctttgtttttgtctgctcagcctaccgttgaggatcccagcactgaagcctggcctctgccctctgcagcctcctctgtctgggtctgacattctgagaaggaactaactacaagggattttcattttacacctcagctagacagagaggtgcaaacagcctgtggagggggataatttgcaacatagttcctctcttacctccaaattttgagaattccctctgataacactgggaagttgttcaaaaggaaactggctcctattctcccgctccccacagaaggagacctccagatgagctctaggtggatccacactgatctacccggccgggcattgagcagtcactgagttcctctggaataccccctttagtgtaacagaacagccttaagcacctcccccccccacccacccccacccccccccccaaacaggaatgacagaggggatacggggcgggacgccaggaaagtaactactctgtgaccttcggcctcttaatcaaaagcacccaagtaaagcaaatctccaagggtggatgaggccgaggaaccgagctaggcagaagggccccaaaccagagcagacacacagtaagaatttgaaaacactggtgactactgggtattgtcattgtcttcattctgcctctggcaacagagccatctgcggctgttctgaccaacacccacatccccttcttctagaaggcacaaccagctttgtttgggtccttcaaccactccctgcatatcatacggaggtttggtctattgctatgtattgctaaattctatacacgtgtttactagcttttgctgtgcaaaccttgtgatttaaaactagtggttaaataaaattggctacagccctttcctggagggattagaggtaagtgaatttggggtgacctggttggaggaaggaatgaccaaagaaagagatggggaggaaggtgccatgagggaaaatgggctgagagcacatggccagtagaaacagcaagtgtctggggtacaccactggggaaggagccaggtcaccagttagaggagtagattaggggttaccctccagtcattgtcaaagccaataataataataataataatagtagtagtaataataaccatgacctgagtctcatttatttctaagctatttggggataagcttgaattgtttgtaccacatatagtcttaggaaaactgtcagtcaagttaccccaggaaagatggctgggccaagaaatgctatgactcttaagagtcggtgacaaatagaaagaaaatagaaaacccaggaattcatctcgggatccaaacatggagcaggcttgctgtcagcactggcagcaaaaatgttccgatccattctgctcacatgcaaatcctacaggttatgtctgtggcccaccaggaatgaacgcaccctgagacactctgcaagaaggcatcatacttcagcacactgctctgcttccatacatcacaaaggcaggtacaactttaagagaggaatcctgtaacatacagtcagttcccccaaaaatgataaacatcccaagatcagaaacaagactaaaggggaagatcttagatggtccagaagccacagcacgggagcgctggagcacagaagtcacagcatgggagcactggagcacagaagacacagcaagggagcactggagcacagaagagactgcatgggagcactggagcacagaagccacagcacgggagcactggagcacagaagtcacagcatgggagggctggagcacagaagtcacagcatgggagcactggagcacagaagtcacagcatgggagcattggagcacagaagagactgcatgggagcactggagcacagaagtcacagcatgggagggctggagcacagaagtcacagcatgggagcactggagcacagaagtcacagcatgggagcattggagcacagaagagactgcatgggagcactggagcacagaagtcacagcatgggagcattggagcacagaagtcacagcatgggagcgctggagcacagaagccacagcatgggagcattggagcacagaagacactgcatgggagcactggagcacagaagccacagcatgggagcactggagcacagaagacacagcatgggagcactggagcacagaagagactgcatgggagcactggagcacagaagccacagcatgggagggctggagcacagaagtcacagcatgggagcactggagcacagaagtcacagcatgggagcattggagcacagaagagactgcatgggagcactggagcacagaagtcacagcatgggagcactggagcacagaagtcacagcatgggagcattggagcacagaagagactgcatgggagcactggagcacagaagtcacagcatgggagcactggagcacagaagtcacagcatgggagcattggagcacagaagagactgcatgggagcactggagcacagaagtcacagcatgggagcactggagcacagaagtcacagcatgggagcattggagcacagaagtcacagcatgggagcattggagcacagaagtcacaacatgggagcgctggagcacagaagccacagcatgggagcattggagcacagaagagactgcatgggagcactggagcacagaagtcacagcatgggagcattggagcacagaagtcacagcatgggagcgctggagcacagaagccacagcatgggagcattggagcacagaagagactgcatgggagcactggagcacagaagccacagcatgggagcactggagcacagaagacacagcatgggagcactggagcacagaagtcacagcatgggagcattggagcacagaagtcacagcaagggagcactggagcacagaagtcacagcatgggagcactggagcacagaagacacagcatgggagtattggagcacagaagtcacagcatgggagcactggaacacagaagtcacagcatgggagcgctggagcacagaagtcacagcatggtagcactggagcacagaagtcacagaatgggagcactggagcacagaagtcacagcatgggagtattggagcacagaagtcacagcatgggagcactggagcacagaagtcacagcatgggagcactggagcacagaagacacagcatgggagcactggagcacagaagacacagcatgggagcactggagcacagaagtcacagcatgggagcagtggagcacagaagtcacagcatgggagcactggagcacagaagccacagcatgggagcactggagcacagaagtcacagcatgggagcactggagcacagaagtcacagcatgggagcactggagcacagatgacacagcatgggagcactggagcacagaagacacagcatgggagtactggagcacagaagtcacagcatgggagcgctggagcacagaagacacagcatgggagtattggagcacagaagtcacagcatgggagcgctggagcacagaagtcacagcaagggagcactggagcacagaagtcacagcatgggagcactggagcacagaagtcacagcatgggagcactggagcacagaagccacagcatgggagcactggagcacagaagacacagcatgggagcactggagcacagaagagactgcatgggagcactggagcacaggaaccatgatgtgtgagcgctagaactagagcaacaagtttggctactccaggaacagaactgagaatagtctgtgtcagatgcagggttgccagcaatgcttactgtcaggtgctgagtatccatcagccaagaaatggggatgtactgtctagttttgtgtcaacttgatacacctggagttatcatagaaaaaggagcttcagttgaggaaatgcctccatgagatccaactgtaaggcattttcacaattagtgatcaagggggaaaggccccttgtggatgggaccatccctgggctggtagtcttgggttctataagagagcaggctgagcaagccagggaggggacaaagcaaagtctgcctggacacctgcagcagcagcttctttgagcctctggacctaaagggcagtctggacaaagaaccccagataactggagcccttcaaggcatctgtctggtctaggatttgcatctccatagaatagaacccaaactctattgcagtgatccttatccttggccacattccaaattcctcagaggaagtctgaaaccaggaacattgatggatttggtttttgtggtcaccagctatcagaaaaatattaggtggaaattttcagatataagtagttggtttgtagcagaattctcagtaacacgatgaactctaccactttgggctctgtcacagtggctatgactcacacctcggtctagcaaatctacattacacagcctcccctgtctctgtaagccatcttggtgattgggctaactgagcattcagtgtctgcatcgtgacttttattacacttaataacatctccaaaggttattaagactggtgaggcttggaaaagcaggttttccaaagagaaatacaaaaggcttcctttaaacaacaaggcaagggtccttaggaggaagaagaggaggaggggatgaggagaaggaggaggaggagcagcagcagcagcagctacaacaacaacaataaataacaaatatcctatgctgggcttgctaaggtctatggctagtcaatgttgctaatttactactgtgcctaatttataaatgaatctttaacatagttatgtgtagatatggaaaaacacagtgtattcagggtttggtatcatccaagtttccaggcatctgctggagatcgtcagatggatcccatggggaaaggaggatgttctgtatagctttatgtcatggtgacacaagttaagtcttctgagaggagggagcctcaagtgagaacagtctcagttagatcaggctgcagacaaccctgtagggcatgttcttaataagtgatggaggatgacccattgtggatggagacacccctgggttgctggtcctgggttttatagaaagaaagctgagcgagccagtaagcaacacccctctacggcctctatagcagcagcttctgtctccaggttcctgccctgtgtgaggtcctgccctcacttcctcagatggtgaactcttatatggaactgtgagtgaaataagccctcccctccccgggttgctttggtcatggtgtttcatcacagcaatagggaccctaactaaaacaaggggctactgtataaggcttactcctatagagagcagacaaccattaaaatagaaacccaatgatcaaggcaggagagagaggtcaaacaaactaaaacatccaactccaaacaagtcagacctccaaaatatagggaaaaagagaacgcagaaggaagttaacaaatgcaacaatgtgaggatgcactcatttcagataaagttgggtgtgtagaacaataagtctgagtttgcttctctgttgataaaataccatgattaaaaccaatggggagggaagggtttagtttggtttgcagtgtagttcatcacgaagggcaggaactcaagacaggaacctgaaggcaggaactgaagcagaccgtggaggggtgctatttacaggcttgctctgtatggcttgatcagcctgctttcttataaaactcaggactacctgcttagaatgtgctctggaccctcccatatcaatcattaatgaagaaaatatccatagtcttgcccacaggcctgtctggtggaagcatttcttcatctgagacaccctcttccagatatgtctaggtttgtgtcaagttcataaaactaaccagcacactatactcccaaattacttactgttgtaagaggtttgcaaaataacagtcattacaaaataaaattaggccagatagtggtggtacatgcctttaatccctgcacttgggaaatagaggcagatggatctttttgttctaaggtagcttggtctacaaaattagtccctgtaaatgcattttttaaaagatgataatcttttctctatcccaactagctcccaaataaactagacagactataagatttatttaatcaggctttattgaacaataactgtgtagtcattaacctattctagtcctctaagctactctggctacctcccaggcaaaatacccatgatacttgcatttatagtattgatctgcctttctccgtttcagttgtttttccatgatgtttctcctggcccttcacttgtggcaactttctctcttcctcctctctctttctctctccctcccctcactggtggaagtccagccccattctctcttctgcccagccattggctgattagctttcattggcaaatcagtaaagacagaggtagaaatgactttcacaaggatattgtggggcagtggtggagcatgcctttaatccgnnnnnnnnnnnnnnnnnnnnnnnnnnnnnnnnnnnnnnnnnnnnnnnnnnnnnnnnnnnnnnnnnnnnnnnnnnnnnnnnnnnnnnnnnnnnnnnnnnnnnnnnnnnnnnnnnnnaaaaaaggaaaggaaaagaaaggaaaggaaaggaaaggaaaggaaaggaaaggaaagagaaaaggaaagggaaaaagggaaaaggggaaagggaaaagggaaagggaaagggaaagggaaagggaaagggaaagggaaagggaaagggaaaggggaaaggggaaaagggaaagggaaagggaaaggggaaagggaaagaagatgtttgttaccctctggatccttagaagcaggccatggggtgagtagaggcctgtgtggtcaacaagaaggaccaggggagtcagcaggcttagtcaggctcctgtgcatagttgtgacaggcagggaatatttcgggggcaccatggttattctagttgtctggtacttggcaaaagggccttagaggtggtagctgggagtggggggtgggtatatggctgctttacatgcagaagcccagcccttaggctgtatttatttaactaaatattgggtaagcacagtgggaagatgatttgtcagattccaacatttacaaacaactcttaaaattcaatatgaaaaaaataacagaacctcaactctaggtgttgcactttattttcttaacataaatgtcaacatgagtacatatgggcaccactcagtagggtgtgtgtgtgagagagagagagacagaaatagagacagagacagagacagagacagagagagagagagagagggagagagagagagggagagagagggggagagagagagggagaggagagttggaaggttttaaattatgtaaatatggtgtatttatttaggtatgaaacactcaaaaaattaaatatcaaaaacattaaaaatgaaaaaaagtaaaacaagaaatcaggatttgatcaagataggtggtccatgggtttaccggtgtctgtacctatgtcctttttaagaatatcttttcccctaaaacatcagaatgagttataagtgttgtagcagaaccaaatgcacacctgtctttaccgtgaccataatcacacacagaaaacgctcactgttccctccctaccatgggctgaatcctgagacccagcaggccagatggtgaaaggaggaagccctatggacccctgggtcatccatcagagagcttcgcctccctacctcaaggagtccattttctggcagagttcagaggcactgacagctgcccatgggtagcagatggggtcctgaatctggctttaatgtggggatccagacaccttgggtgggctttacttccatgtagggcagggcggtgaggagccacaggttgctgtatgaggctcccaggtatggagaaaggtctgggctatcctttctgcagcaggagccctacagccacagcctcttcaataatgttcacgtctcttctcaatacaagaaacttctgttccactgttagctggaagcctttcccccgtacttttcagggaatttaattaccaaagttacaaaatatatacaagtcagtctctgagtgacaactagggaacagacaagtgttcaacttgatacaagctagaatcatttgtgaaggggactctcggttgaggacatgcttctataggactggctggtcgttaagtctgtagtgcatcttctgaattaatgattgatgtgggagggcccagcccactatgggaggtgtcgctcctgggctgctagtcttgggtagtataagaaagcaggctgatcatgccatagagagacagcctataagcagcactccttcatggcctctgcaccagctcctgcctccaggtttctgccttgagttcctgccctggcatctctcagggatgtactctgacttgagaactgtaagatgaaatgatgctttaagtcatggtgctttattataatattaataataaaaaaacccaagacactagtgaccccaatttaaagccaaaaacatttccacaatcagtgtccaacatgtagccttccgcttcagcacttacaatgaaacttatccctagaaatgaagtacctcttagaggtaagggcatattgctgaatggaggatgggtgtggaacactgatatcaaaaggtggctaagagggtgattccattcataaaacaaattacaggcccatatgaatggagatggattagtttgctggggtcaggggtagtgagtggatagtgagtacactcagtcaatggtggtgggtacagatgacctttggggtgacatatggttctgcctttttatgcagcggtagtcacacacgtcaatgtatgtgagagtgggttgttgaaatcatctgttcttatttattggctgttagcagccatgtaagtgctgggaatcaagtctgagtcctctagaagggcagccagtgctctcaactgctgagggggatcttgtttctcaatcctgttaatttctgtcctttgattaggaagttgagaccattaatagttagttactgaaaggtgtggttgctgtctgttctcttgatgatttggagtttgtttttaattgttcatttgcttagttactgtcctagcctgtgactgaaacaaggacatgaccactccacagtgtgaggttggaggctatggattttattcagtcagaggcatctggaagagcacagagcagggagtgacaggagcagactaaacatggccagtgtgctcagagggcaggtggggagggggtgttgagagagaaagacagagacagagacacagaggcagagagacacagagacagagagacacaaagacagagacagagcgcaaaagagcagaacgctgagaagagcagagagagtcaaagaaacaaaagggagagtagagttctataggaacaagggaggggaagggaggggaagggaggggaaagnnnnnnnnnnnnnnnnnnnnnnnnnnnnnnnnnnnnnnnnnnnnnnnnnnnnnnnnnnnnnnnnnnnnnnnnnnnnnnnnnnnnnnnnnnnnnnnnnnnnnnnnnnnnnnnnnnnnnnnnnnnnnnnnnnnnnnnnnnnnnnnnnnnnnnnnnnnnnnnnnnnnnnnnnnnnnnnnnnnnnnnnnnnnnnnnnnnnnnnnnnnnnnnnnnnnnnnnnnnnnnnnnnnnnnnnnnnnnnnnnnnnnnnnnnnnnnnnnnnnnnnnnnnnnnnnnnnnctctttctttttttgtgtgtgtgtgtgactgaattaagattttttaaacaatttttattagatattttcttcatttacatttcaaatgctatcccaaaagtcccctataccccccccccccgctccccaacccacccactcctgcttcttggccctggaattctcctagaagagatttttcaactcatggtgaacagaaacaaaaagccaaaggtgatatttttaaaacaataggaatcaattgttttgtgacttcttaaacgtattataaacatatatgtatatgtaaatacacacacagagacatatatgtgtctatggaactgtcacttggatgaaactaaacttaaaaatcaattcagggaaattttatgtaatttatttaactgtaattttatgtatgtttttatttgcatttttcaaattaaactataattacatcatttcccactctacttcttctttctccaaagcctctcatgtgaagggagaaatgaaaagggggtggatataattggggaggggagtgtcttagtcagggtttctatttctgcacaaacatcaggaccaagaagcaagttggggaggaaagggtttattcagcttacactttccacattgctgttgatcaccaaaggaagtcaggactggaactcaagcaggtcaggaagcaggagctgatgcagaggccatggagggatgttccttactggcttgcttcccctggcttgctcagcctgctctcttatagaaccaagaccaccagcccagagatggtcccacccacaagggtcctttcccccttgatcactaattgagaaaatgccttacagctggatctcatggaggcatttccccaactgaagctcatttctctgtggtaactccagctgtgtcaagttgacacaaaactagccagtccagggagccaatacggaaggaaggagatagaataaataaccctaaggatgtttgaaaaaagccagaaggaatcatagtatttttacattcacttaaaattacatataatacatgtatttgtgtatataacgtgcagttttaatggatctataagacaatatttcccccacgagtcatatcctatctaacaatgaccccagtaccaatttgagaaactactctgagttattggccaagggtgtccaagagactcccaaaacaccagaatccattgcagctgcctttggttgcctcccagaggctgaaggtaagtccccgtggctgaagaaccatgcattcagacacagggcttggagaaaaccagctagatctgctccaaaacgtcttgcctgaggaccagcttttgtaattccagaaggtgctgtgcaaacttccaagcagagcaggacaaagctgactcgtgacattggcactgagaattaaataaggaaaagtaaacttgaggggagggagctgagtggggtgcagggtatgcatgtgctctggctcttcccatcttggctctcttggtgttcctgctccagctctcgggtgcctgttacaccctcgagaggtctcccatgcttctctcggctgtggaccaccctctgcgggtcactgctgatgctactcgacacctacaggtggtcctttagtgatgagtttgcaagtgtagttcctgcctctgtgtgaacctgctcaaacctgggtcaccgatttggttccaccagtgggcatgctttcataggtcagtcatgtcacagaggctggtcacatctcttattgagccttcaggaatgtggttgcaagggcaggcttctgtcttggtttgttgggagtggatgatgtcttgagtcaatgcgtgctcttgatgtggacacacctatgtttaattactgcactgcctcagccccgtgggagtggcaaagccttctccctgggatgaggttcagagagcaacggcaaagcctcccctcttgattcaagtctgaatgctgatagcacgtgagggaaatggacaccaaagctttctctgcctgggacatttatatcctgaagactgctctcccacagaagctgctcctatggagattaggtaaacctgctcgactcagctatggcatgaatcccgtgtccttgatttaactacatgaaacaacccccacctttctgttcaatgtatgtagtaagcatgctgattcttcgggggagctgcgcttctccatcagaagcccaagtccaccttattccagcgtttctctacattcctctgtgtcttccccgtctcacggtccagtcaggtcagttcctggagccgtgcaaggacgcggcggtggttctctgtggagctgggtttatagatgctgctctcaccaccaaaggtcagcatgctgggttttgtccaaggccttgtctgcatctataggtcaggatgctgggttttgtccaaggccttgtctgcatcatctattgagatgattatgtggtttcctaaccttgaatctgtgtcagtcaaggttctctggaggaatagaactggtagaatgaatacgaaggtataagtgcatgtgtgtgtgtgtgtactagataatatatatgcatatgtattattttttagagtggcttacagtctgtggtctggctagtccaacagtggctgtctccgaacagaaaggccaagtatctagtagttattcagtctgtgaagttggatgcctcggctggtcttgagtctctattgagatcctaaagaagtagactctactaccggcaaaggcatgcctcagggacagggtagatgaatttgcagtgagagtgagggaagcagaccaaaagcaaaaagcttccgtccttcatctcctttcatgtgagcttccaccagaaggtgtgtcccagatttagggtggatctaattaagaaaatgtccccacaggcatgcccagaggcttggttgattccagatgtagtcaagttttcaacacgaggccatttatgtgatgaattatatttactgatctagttatgttgaacatacctgtatgtctgaaatgaaaccatcatgatctttttgatgtgtacttgaattaggtttgcaaatattttattaaggatgtttgcacctatatccatatggggagatcagcctacaactcttatttgcctgggtagcaggacactgagggcttcataagaaaaatttagaagtgttccttttctatttacagaataaccagggcattgtgatcttttttaatagtctggtagaattttgcactcagctctcagatgacctaagtagaggagggaaggcaaagccatatcaaagacccccaatgatttgaccagtgagaatggcaaagcctaccccagttaaggctcagaggcatagcaaagcttttctccggtccaagtgtaaatattcagtgtgtacagaaactgtcaactacagcttcctcttccaatatggttacaacctgaaactgctcttccatctcctcattcagctgtgtactacaaccctatccctcgccctgctgtttaccataaccccacccctcgccctgctgtttaccataaccccacccctcttcatctgtttaccataaccccacccctcttcatctgtttaccataaccccacccctcttcatctgtttaccataaccccaccccacttcatctgtttaccataaccccaccccacttcatctgtttaccataaccccacccctcgccctgctgtttaccataaccccacccctcttcatctgtttaccataaccccacccctcgccctgctgtttaccataaccccacccctcgtccagctgtctagcataaccccacccctcacccagctttttaccataaccccacctcttcattcatctgtttactataaccccacccctcttcatctgtttaccataaccccacctatcactcagctgtttaccataaccccactttcttgattcagaaatgtaaaataaatgctgtttctggattgctggtgtgttagtggcctctgtaagagtgagcacagcacagcacacagcacatcccagcttttccgtgtgtctgtcctttcttcattctcttgccctacctgattaggtcagtccctgagcctaggcagagagtggcagaactagactcttttttatttgggggatttttttcttctactttattgcttgttatgtcagttttaatgatgtacttcatattgctttattagatcattatcacctagaaatccatgtttctttttattttctagtttagctggtggcatgtgaaactttaaggtatgtctttaaaagtctctgtgtttccttaatgtgtccctattcatctctgatagcatcaatttgggtatttcttttatttgccaatctcgtttctctaagaaccaattatttgcttttttgattcattgtacccttttccatccctatttcatttatttataccctggtcttcctttttgccaaccctattgctctgggaaatggttctttccagtgccttaaggtgcatcatgagggttggtttgttcgttttttcagacagcgtttctccttgtagcccaaactgtcctggaactcagactttccgcatctctggctccagggtgctgggattaaaggcacgcaccactcacacctggcttttgttttgttttatgtagatatttagttataaacttgactccaccactgccttcgctgtatcccagattttcataactgttcattttctttcagatctcaggctttcatttcttctttgatgacttacacaccattgaatggaatgttgtttactctccacgagtttgttattttctgtagttgctcttgctgttttaagtctttactccgctatgatcagatcagatgcagggcattaatttccctgcactgaggcttggtttgtgacctaataagtgatcaattttagatggttcctcgtgctggggagagggcaaattctttggtggctaggtagactgtgctgtagatgtctgtaaagtccatttgatctataatcccaacgtttctatattgatttttttcccgtcatctagtaagtgaggtattgtattgctgttaggatgaatttgtgactttaaatattacagcatttgtttttaggaaactgggtgagcctgtgtttgctgagtatgtatttaatttcctcttgatggattatttccttgatcagtatgaagtatctccatctcttctgacaagtctattttgtcagaaattggaatagcaatgctgcctgttcctgagtctgtttgcatggaatagttttgtccatcattttatcctataagtgtgtttatctttgatagtgagaaatgttcctttgaagcaaaaattacaaaaagatattttctaattcaaggttctatttccttctctcttgagagcgcccacatcatttaatatcccatgattatgaaaggtgtatgctgattcctgtcattttgtttgctgatttgtggcatttgggtagttcttagctcgcccctgctaagcattatttattttattcttcttgtagactcttgagtatattcatctttctctccagtcttaggtatttcctccagcattttctgtagggatgaagtggcagccatgaattctgtagcccacttttatcatggaaactgccatcctcactccaacagttttgctgggtgtgtcaggccattaccagttgtgttctttcagaatctgaaatgcaccactctcaatgtttaggttgttttagccaccattctaaatacttggttattttaaataagactggtgaacagtctgtaattatttaatagtaccactacttgcctggccctctaaagtagtcacagaccaccctaaaacaacaaaaaccaaaaaaacctcatttaccaggggaagtaggagacctttcttcatgcagttttccccacttagtgatttgtaacactctctttgcataggaggcccttccagcctctgtgtagtcctgtggtagaatcataggtataccctgcaaggtgaatttaagactcatgcactatatactccagtgcaacttaaggcttatttctcaaggatgtccccaaaggaaccacacagtcagtgtccctattctaggtaagatcatctcttattcctataggactcctcctcctgctgctgctgcaaacaaggaactctgcctcaagcctatagtgcctgtgcttttctccaacgggccccgaactcagtgaagtaatccattgtcagtcatgtgcgggaaatatactgcaggggcaaaatgaatgttcagcactcgaaaggctatgaattaaattctcagcaccataagaagaccaaaccaaacaaacagaaaggaaggaaggaaggaaggaaggaagagagagagagagagagggagagagagagagagagagagagagagagagaccattgggggcagtctttaactatatgccctctaagcccacaaggctccaatggatagctcctgacccgggcacaaatagctgtgattaactttgatgaattaccaaacaaaagtaacagatgcgaacttgagagagaaatctgtgaggatggggaagagagaagaggcacagggatggtaggggagagagtggccagcctgcacatgtgagactgtaaataccacaacaaaaataaaatcatgcctacaggtgtcactcggtggtagacatgctatcatgtgccagaccttggattccgtaagaaagacagggaaggaaagagggaaaaatagaaggaaccatacatatctctcccaaacagggcatgaagctgcacctggaggtcctggcatctagttccaaggagacactctaggaaagggacacatcaacagacaatctgtacaaaggcctggtccctcgccccacccccagctcccccagcatgttctcggtaagggagaagctggaaagccctgcctgtggctcagacatcatctctccaggttggttcttctccctgccacccctcccccagctccacggtaggaaaggaggccagcagggctttctcaggcatgtctttattcctctgcgctttggtctcctgcttaggttcgcacacgtgtgctgcatctcactgcatctcctggtgtggctgagctttacctgctcttattgctggactctctacttccaagagcacaacagagagcatctctgaatctacagacgaaatggctacaacaaggtgatcggcaactaagtctgccaggatgggcacaaccctatacggctccagtggctgtctagagacatgactagtaaagctaaagaaaccatcaccaccccaaaaaaaaaaaaaaaaaaaaaaaaaaaaaaaaaaaatccagaaaggttagcagggctggcaagacaccacatcgatgtcccctctatctgaggaaagctaatccttgatcctgaccaattaatcctgaaataacagaccaaagccagcagcgctactctttggtccaaattgctacatggatgtggttcatctggggcccagagtttccagatataacctccttcagaagatcactctaaaatgtcttgccctcgaaggccttcagattgaaggcagtatccagaaacctcctcagtgacaccaagtgagcgttcttattcccagtggctggtgcggctgctgggtcccggccgacatacctggaggaggagagtcagctcagggaaggccgggtagggtcgcacacatgaagaagactgcctgcccaggtggtcctctacttagaggccgttgcactgtgggcctacaccaaattcagctacccagccacaggacacagaagttgcccactccgtgaccatggagacaataaccatgccacagcccacagatctttggcttttcccacatttctcatccccgccaccatcttcgcgaagaccaaaatgcccacactgagcagcagtggctgccacctgcaagcccctcaggaggctggcctgcacacactgctatactagcattttctggcagaggggaggcagtgccacggccaggggctaagactaaagggtgaagatctgagtcacacaagagggtctgaaatctgatacttgctgcagaatccttaggcttcctgtccttgaaggtcgtcccactggcaatccccccaaccctgatatgctagcctatagatagaaagctcagaacctatagggactcaaatgcttgccagagaaggctagttctcggtggcactgccaataaggcaggaaaagctagtatagggatgccaggatcaagaaccagtgcagggaagggagacagatgttgagctctctagcccagtaccatatgggccgggagtggccgaggagagtcatgaagcgtggactgatgtagtcgtaatagcccatgttcttatgttcctcctgacaccacaccagctcagctcccgagtacttctctgcctcccgcatgatcaggtcgaaaggaaacggagagatctggggaggtagagatacaaaggcagagtcgaggggggacaacgtgtgcagggcctgctctgtgctcggcagtcatgcccacacaccacagagccaggggcctgtctatcactacagtggcaggacacttggcaaacctgctccaggcgtgtgatggccacttgttgctccaggccctggctgctgcgttcctttaccaggtcatagtacacctttcccgtgcagaagatgagccgctggacctgctcaggagaatgtgctgcggggccgtcttccggaatcagccgctggaagctagttcctaaaggatggaccaggtacctcagggttatcagtaccagaagggcaacgggccactgagtacaccaaccatccctgggctactcccagctactgagctgattcaggtaagactgattacattagacggcttttgatcccaaagatggactaaaggacagacgataccctatgttgtcagagggagaggggagacaggtctgtggacaagagcagagataacacattcaaggtatggggtacaggagtggaaagggcccgagggacagaggaggtaacatgatgggcccaggatagcaccatcctgctccagatctgtattcccaccccagttgtgcccacattagacatggcactcagcccctgtatgctagggtaagctattgggaggtcactgtacactcctcccttagccccgttgcagagcctccatctcccagccctggccatttctccttcctgaagtcaacgtgctgtaaaattcctcagagagctgctgtggtgtccctgtatcaccacccctctgagggcactgacgtacagagggcagctgctgccaggtgtagggacagagctaccagtctcccagggggtagtcgcactagtggatctgactatccactacagctgccttcccataatggacgcatagatgaaaacaaaataaaaaacgaacaataaacccctcaagtgtccatgctgctgaggccctgacctagctagatcctgtctatctctactcaggactcagccaaaccagatctgctgctggcaacaagcttcactcttgtgcctccctgcctccctaccaggtcagccttcgagtcttcatgtgctttcctggcccctgactcttgggggagagggcagccaggttcccagtgatgtctacttggttcatgagtgaaactagagatagaaaatgagggagagagcggcactcagtgtccagcaaaccagacactgctctgctggcgtctcatctcctgccagccctaactgacaggtaagagagcccaccaactcctgggaccctggagcttattccaaatgatctgatctcccaaggaccaggccaggagctgcggagggacaatgaagacagaggctgagaagacagaggagctccgggggcagaatccacacatcagccactagacatcacaggtcaccaccccagtgaaggaggcccaccaggcccagagcagacacataccggacaccatctggtcaaagctggacttggcatcagggtgcctcagcagagacttgggtgtgaagacaatgagctggaaggcaaaaagccagctgccagtagctcctatcctcctatgggttcccacatccaacccctgcaccgtcatggtgctaaaaggccagggcagctcacaggcttgcggaagggcagcaggatctgtcggcgcagcacgtggaagtagctggctggggtggagcagttcaccacaatccagttgcagtcgtagagctggctcacctcaaagtcctcagtgaacacctgcagggaacacctggtggctaggagtggcactaccctggactatatttgccccccccccccccccccccgcctggggacagcaggcagcactcactgggtaggcatccgagtcgtcattgctcatctgcaggaacctctctggccttgctgaggagtgctctggaccctgaaagtacacgtgacccaggctgagcctgcagaacctcagccttgtggtgcccagatggcttcaaggggcagattaaccctgtctgtgcctgttcccaccttgcccacaggtctggatcacaagttccaagggcctgaaaagctcttcaggggaccaaggggtgaccctgccctcctatgggaggcctgcaagggcccccaaccctcaccatgccctccatgccgtggggcagcagaagcacgatgccattgtgccgcacccacttggcctggccagtgctgatgaactggtcgatgatacactgggctgtgttgtggaaatcaccaaactgagcttcccagaggaccagggcgttggggctggccatggcatagcccagctcaaagcctaggcaaaggacaccaagacagagctcagtgcaatgtcaccaagtagtagtggttccagttaaacccagcctttcctcagtatatgctaccagtcccaaccagaccttcccgacacaccagaaaaaggcagaggctcgctgggcctcgaaggcctggctgtgtgttcctggatgtggaagcatgcttttcttacaccacatgttgtcatgtgcagctcagctttatgtggcccttggggacaccccatagacccctgaagacatgcacaaagttcccgatgaagggtacacaagcccacaggcaactcccaaaagtggggctgaaccccagaagtaagagggcaagggtgctggcttaaggtaagctgagggaaggcatgtccctgtagagtcacaggcgaacctcaatactggactcctggggtgcaggagagagaaggtgggcttaagaccatgtgtccatggccgggcttcctgctaggtggtcagtagctgcattctgctatggactgtcctggacttttgtacagaccctctgtggttggcatccagggaaagagtttaggtatcacatagaaaataaagcaagttgggcgtggtggcgcacacctttagtcccagcactcgggaagcagaggcaggtggatctgtgtgaatttgaggtcagtctggtatacaaagcgagttacaggacagtcaggactgttacacagagaaacaaactttgtcttgaactaacaaacccaaacaaacaaacaaaaaaaaaaaacccagcagacagaaagaaaagaaaaccaagcaaatgtccctttcccccaactgagatgcctggtggaccatgtgggacatgatttcatatcccaaatgtctctgggaagaaacggtccagccacagtccctcaggaccatcctagtacctctgacctccttcccagtctctgaggccgcctgtcctcccagaccctgaggcatgccagtgagcccccacccacctagaactccatactctgagagggagctattgcacacagtgtacggggcctggtcaggccacagatgattcatcgggacacacgtcctccggtcaacttcctggtcatgaagaacatggtgccggtggctggggagagagaagtcaggatagggacaagagcaaggaggctgtcacacgggcagcagcaggtaggtaggtcttgtatgttcccaaaggcctataaggtcctatgaaatggccacaccaaggttacccaacaacctgttcctttcccagtgtcttaccagccccgctttctgcctgccagcgacccacacagtacaccaagggtgccaggctgagatctgaaagctacaatgtctcttgccttatcttctcaaccacagagggaaccagtgagacctgccttgcgagcatcctagaagcagggtggcccttgagatcccagcaggtcacatctcttacatgtcctaccatctcaaccaccacacctgccctgtccatgctcagaggagttgctactgagttatgagatccatgggaagcactgggaagaccccaagatgaaagagtaagtgggccaccagattgaggcccaagcccaacaaacaatggcatgcagttcaggatgcagctgatggctgcctgggtccaagctgaaaaaaggctggcagaaatgagctctgggaacggaaaaatggcttgtggtcttggaagccaatgaacatgatgcagagccaagactctgaatatttagggtcccaacctagaagaaatatgtgtcctcactcagattccaaaactcaggcagcaaggagggaactctaggctgacaaaggtcaccagttatagaaataaaggttcctgagggccacatgtgattaccagcttgggacaaccagtcagctcggcatgtgagggtcaggaaaaggaccgtctgaaaacttggccctgactatgcatttagccagacaaatgccgcccccctcccccgggttcctagagaggccaggtctacctcagatctctaaggcttaaccctgggatgcctgtgttttgctgagttatgagatccatggtctcagtgaagacaagagcagcgcccaagggcccagggcccagcttgcctcagcctcacctgaatgtgcccctctccacatcctggccgctgagtcgcacgtggatgccctccttcagcaatgaaccaaaggccatgtactctgccagggcccagtccactgtgcgcttctttgtcatgtctgcacggccacgcaggatgcgagagaggcctgtgaggatgaggaacatagttcagcctcaggcctggatggctgaagcaccagagctatggggtgagggctcagtgagaaagcaaaggatgtgggtggtcccctcagactcttctccctagcctgtagccagaccagggctgatctgagcttcctctccaaaggaggaagtggtaatatactgggtcagaattctctatgacacttccatagaggactgtccctgtactctagaagaggagactgagctaataaactccatacacccagcaagacccttgcaatgtgtacagaatacagctctaatcttgggtgccatcagtgggtacctcatgcatacttttgagagttgcagtcccaaaagctatctagaagagacacagacatcttagaacaagcttctctgttctcctaaatgacccggggctaccctagaggctgtcttttcaatgttccaatctaagagctcaccctggcacccagctggaatgtgatatccacaaatgcctaactccccatacccactgggagtggagttaggaacatgggaacgggcccatatgaggctctgagccaaaccaggagaccaagaggctaagcagggccatgccacaatctctgttctcccttggtatcccaacaactctctctgagggctacagtgtcagctctgagggtaaccatgctggggcttacacagcagccttacctgtgtggatcttaaagtcctccaggggcacagagctggccacactgccaatgtgggtcagcatctcctcagggatgcctgtcgtagggcatgtcatgctcttgggctccccatccacattgaagaagcctgaggggacagactccattcatactccggtgatgaggtgaggggactttgacacccctggttagttttctgtcctaggataggaaggctacaattccttccctcccgagacatcagtatacacccttggatctgccacagatgaaaaggttcggccatagcacctacacctgccctaataatcccctgaggtcacagctggcctatcttggccccaccagagggaccctcttagtagacgcctccagtaccacccacccccatccctggcgaggtacagattgccactcttgctctaaggccaccttggcctgcctccacctgcaggaacagctcacacctgcacgccaggcacaagcctcaccttctagctccgcagtggctgctctccagagtcactgcaatgcttaaaggaggctcaaagggctcacttggctgcgtgttcctcactcaccaggccagggggagtccagccagtgctttatatgcaggatcttcttatccttggacctgccgtaggcctcctcacagatacggtcatatttggcaatttcctcctggaagggagaggaagatgtggacagtcatatactaagcatccaagagggtcagtcagcccagactcaaaagccctggtctccatcacaggttctagaactctgtttcttggttcacaaggatgccatggtcggaggcctagacctcagagtttagactggtcttggacagatactccaaagcctgaagagcccaaagtgtgctacagaaagagatccagggaggcagaggagagactctcaccttgttttcagagggtctaccataaaggcaggaggattgacatatttatgcaattttaggcacaatcccaatataataccttttagagaatcgttacaggacatccctacagaaagatccctttcctgcctgaaacttggctagtcccaggtcacactgcacacctaggtgtacccatgcctaaattcctgtgccctgttaaaatccagagactttcagagacagggaacatcagctactccttcaaaccttcgatgtctagcactgggctgatggcttctgcagccatcccacgttcccatgctgtccatctgaggtttgtgtctagaagtcccgcctacctacctcaaactcctgcagagtgacggtgccctcggcgatgagcttgtctgcatacttcttcagcacgggtacctgcttgtggatctgcttgtacatgagtggctgcgtgaacatgggctcgtccatctcattgtgaccacgccggcggtaacagacctgcatgggcagccggggcttcagtccctactacaggctgagaacacagtgcacacacaggccagggtccaatctgaagcatcccaaaggacctgctttctcctgtcactgaatgaatgctccacgcctaggcctaggcatagatggttggttcttggtgacaccaaccctcagtccaaaagcatctagccctcagtgccaaagacatgactgaagccctaaccatacatgaagatgggccgctccctcaaatataccaagcttgatcagcacagcagaaaagagcccccatatgccaaaatcacctggtttgttagctacccacaggatgggctactaagcctgctctggtaccagccaccctcaaacacacccgattttcttggcaagtcagaatgggctactcactccgtccttggctcctgcacgcccaaaaacacccatcataccctgcatagcaggaataagccatctactccacccctgccctggcctcagtcaggaccccagacccaccaggtctacaacaacatctttgttgaaggtgttcctccactcagctgccacactgcacacatagatcacagcctctgggtcgtctgcgttcacatggaagatgggtgcattgaccacccgcgccacatcagtggggtaaggggaggagcgagccattcggggatctgtggtgaagccgatctgcaaggtcaggagaagccagatgtgtccctctgtgtattcttttttgagacaggatttcattaggtctggactccagtaatgctccaatcttaggctttagagtagctggaactacagacatatactgctgtgtccacaactcctgcttgttttaggctagacatacggtgacaggcaaatcagggagctgggggcgggaggtatcagggtacctaggacacacaggggacgtgaagggataacagtcaatgagtccttgaccagctatgccagcagttaatatgggctggcagcgatgcagcagggagactggcttgcttttctaccagcctctgtgctgcacaggtacaaggcctgtggatctggtccaccagagtgactgcagagctttgggcaagatgtttcggttcccagcctcattgtactcgtctataaggaagatcattaaagtcctgccccgagcaaaacttgaggaagattaaatgctgctgcaaatgaggcggggaacccagggcttctagctgtttgagactctgctgcctggaaggaaggaacatgactaccaaccaagaccaatggttcaggggagcccaaggtcacctacagctacacagccagcccctgtgctgtcctctgggctgctacttatggtgtctctaggtgcctgggagaactttttcaggactccaggcctagatacacaattctacagcatttgcacttttaatcatatacctaatatatgtaaaccatatgtaaatagtcactatattataaactttagagaacaaggggaaaaaagcctgttggtgttctgcacaggttagtgtttcgggtttttcctggttacttttgtgtgtgtgcgatgtggctcaaacccaaggcttacagatgctaggcaagattcttcctggactttcacaatctcactacatagctcaaactgtccatgaactttccatgaaggagcagctggaatggcaggtaccaccatacctggtctggatccatagtcaactgagcctatggatgtgtaacctccagtcgttataaaactgtctgtaacgtgtacagatgtgtgtccagtacatatatgttatgtatctaccaatttctcagactagggcacaaggctggagtctggttccctgcctgaggtttcctgccagtctaaggatcaggttttctacctgaagtcacatgtgttgggaagtagcagggcagaggtatgaacaccatggctgcctcacatttcccactgacccaaacctggacttctaggaatgggcatgcagcctggtacagagccgactcccttacctggttgttgaccacaacgtgcactgtgccattggtggtataagaaggcaggtcactgagatggaaggtctcatagacgaccccctggccagcgaaggcggcatccccatggaccaggatagacatgacctgaatggcagggcataaacaagcaggatcttacaccccagcctgtgaagcacaccctgtttcctctcccatcagagccttgttctcaaaggctgattgccaggggccactctacagactcagaacaacttaccttcctaccctgggcatccccacggtagaactgctctgccttcgtcttgccctgtaccacggggtccacagcttctagatgggaagggttggctaccagtgacaatgtgatgttcctgttggtgacacggttgatcctctcgtggtacatgcccagatggtatttgacatcaccagagccctgagggtaagggtgggatatgatgaacctaccacctccagtgtggctcgtgaccatgctgagccgacttgccaggcttcttagaatgtaccagagctcaatggtaccttacccctcacaccaatgaaatcaaatgcagagacgttagaggacattttaggatctaggagtagagaaagcagactttctaaacaatatataaagtccctacgtgttaagatagctaagcctgggcaaatcttccattagcaaggggaagaaaatccaggcacagtaccaaggaggaaaacaagctggtatgtcaaacgcagggcaagagctaattgctctcaatatgcaaaatggctttgtaattactaaagacaaatcccaaagtcccaagaaaataaacaaaagctatgaaggggattttacagaacaagaaccatagagattcaaaatagttgattcatttcaaaaagtatgttaaaattaaatcattttgcacccatccaattggcaaaggaaaaaccaacagagaaatggggggtaacagttgtgagccgcacgtgctgtggctgggcccaggggaggctccgcagtgtctgctccctgcccaggctcctgcacttctcaggcggcacctgacagctacagtcatgtgctcacttgcagggtgagggtgcctgctacagcaggcagagtcttgacacagaacactgcagctgcaagaagccaacaagccaagctcgttacgtgctggcacggaacacaggcaacttggtgagtgaaaccgccaaatacctacagtgccccaagctgttctcatggctcctggacaaatatatgtgtctgcagagaacacacctcaccacaaatgcaggcaagcatgcgcgggcacaccacacggatgaagttttaaatgttctttaaataatgtcccatttctttttcaaattatatttttcctttcaacaatacttacatgttttcaaatctaaaaaataaaaataaaaaaaataaaataaaaaggtgctactcagacaaaaattttcgttttcttcccccaaatcttctcttcaattcctcacaccattctggggcagggccctttgtaacttctctattgaggagcgaaaagagtcttaacggtgtgaaggtggctgagtgacatgaacaggatgcaggaagatcctgggctggaagccagccatgtgggcaccaggcctgctctggcaccatgagccgggtactcctggaccagtttctttaaccaaactaaacacctgtgctgggtggtcagagacaaagtccctccctcgctcttgaaagaaaaacagatgaacttgtagacatggatgaacacatggggttacacacagatacaatgcagacacacacacagatgcgcacacacacaccaacatagacaacacacatacacaacacacccagatgcagacacatacacacacacacacacacacacacacaccacacaatggggggaggggaatgaaaaaggccagagacaaagcagagggacacagaagaggaaggacagacaaaatgtccaggtccagaagtttagctagagactgaatgcagcaaaggagaggaaggcaggcagtagggctgagggcctggcatggctaagaacctcagtggcatacaagctacagggtgggccaagggcacaggaaaccatcagtccacccatgcctctctggagccaacaagtcactagaggctgataaagggactgtgggtgcaaaggctcagctacaaactctcaagggagaaacttctgggaagtccctgaacctctctgggcctcagtcccactggctggaaagagtaaggctggcctggagggtccatggcagcacctacttaccaagcctgagggacctgatgcaagcagcccagtccctgggactctctccatgcctgtcagcctggcagttcaagtcccaaactctcccagcccaaacaccaggccctctgggggtcccccaggaacagtgtgacacccacctcatctgctgcttccagcttgggatcaaactgacagaagatctgttccaggtccttgcggatcacgttagccagcacattcagcctgcccctgaggaccagaatgaccagggctgtcacctgacactatggtctctttccgacattggccaagtacagccattctccttacctgccattgaacctattggaacccttcctgatggtgcccaagtaaggcccaatcctcccatcctgccttgatataccaggccctggagtagtcccagtgcgtcagcttctctcaggcagactccctgctcatcaatgatttagcaagccctttggggaggggcagaaagccaccaatcacctacagcatgtccctactcattcccctaccaaaaaagacccagcccattatataggcacctcccacacactgaatctagtatgctaaggctcacatgcccctgcagcctagccagcagcagttttgagcaggatggagcagcgaggggactcagatggggaaaatactaagaaataacaggcagccatggaccagattcttcagcccagcctgaacttactattcaaggtacttcctgcagggtgggcaccagcctgatagaacacttaagtgactcaaaaaactcccttctgaacccattagcttcagggtgacagtgaccctaagcctgactcctagccccacacaggaaaggagagcctccttctggtcagtccccctccacacacctgctcccgcagacaatcaggcccaaaggacattcctcagctgctctgggcaaggcccttcacagccctggggttaccatttatgccatggaagcctgaaccggcctagaagggcccctctgatccaggcaaatagccacccagcagatgcctgagccatctgtcttccaggtgttatcttctcctgctgttctagtagcctgaggcacaaagccatgtgtcccatgtcaccacagctaccgggacagctctgcctaacctaccagacactgggcatttccagacttctcaaaagaccgtgagagacaaacctcagactcctgacaggcctgccaagacagaaatcgtccaccccatacatctggagtcccttagacattacagtcctgtgctagcacaaccacgaccagctttctagatcacataagggctttgtcccacagactgctggcaagtggaaagtcaaagtctttgtcaagggaaacacagagtcgccttaagctgggaaactgactgtgcccatctctacagacctatgtccaagggatgccaactcagagccgtctatgcatacacccctaagcacacacccttgacttcttcccatctacaggatctgaacacaatatgttccacagtctgagatcctgcccctcctggagaaagcagcaacatgaccagagaatctgaatgggcctggctgcatgtggctttggctaagtatctggctcttgctgtaaaaaacaggccagaccaggggctctgacaatctaccaaggtccttgctttttggccaagcatcatggtgaggggactcagtggccctacctgtgtggcatccccaggatgacgttctcaatccccatctcactagacttgtcgataatggtcttgagagcaggaatcatgacctcgcagccttccaggccaaaccgcttctccgaagaccacttcctggccaggaagtcttcaaacctgtttggggaatagggaagggcaggaaatgggtagaaagggacaaggttggggctcctgggggcttttcacaagcactgggagctaaatgcccaggacacaggaaggacaaagtcacctccttactgtatagtccaggacccagcccagacaccgtgtcacactcacccaacataaaggacaagcatggtaccttgggagtcttcccaaaaccttagatgccacccatacccaataccactctctcctcttcacagtcatacatccctaagaggttatccttccatattcccgcccaccaccctcctgcaagcctccaacacctctaccctgccaatgcctaaggtgagcccacaccccactgctcagaaagtcactcggcacccagcagcctagcctggtgcacctccaggaccctgcagctctagatggtcccctcctccaaggcatcattaggaagtaatgcactgcctctgccaggagtgccttcacgctacccccacccacatgccggggacagtattctatcatgtcattcctagagctacagggtgtcacttctgcccatgctcagtgcgacctctgctgcagtgtttctctgcagtcccatccccgcccacctatgtggctctgatggtcacattaactgagcatatggtcctgatgttttgcctaagggcttctgcaggcctccagcagtgggagcaagtcagctgccttcccttgctaggccctgctagtttccctgccacaggaaccaagcgtggccctccagccatgcagaatgtccatcaggtagtggctgacctcatggagcgcaccagtctagccagcagggtcctcttctcctcgacggaaaactgcatcacgccaggagtttcaaatttctgtctgatccactggcactgttccacgtcattaataaacatgaactccaggccaatatgctggcagtaggtgctctaagagggataggaggagagtctatgaggaacgggcaagaggggggatagccccagagtctgagactaaaaaggaagctccctccatccctccgcacatgctcatgggctcccaagctaagccaggcatgccttcctgggctcacctccaagcgacgtatgatctctcgaagagagagtgtgttctctgggcccccgatgaaagtcgtggtgggcagccggaactccttatccagatcagcctcctgcaggtcatagaaggctggaaaagaggccaaggcagcatagaaagaaagactgaagttgggctgggggatggaaagcatctcagcagggctcgatgcatccaccctgacacctgtgtggaagccctgagcagagagacgctgggctcagctaggcttcaggccctgcaaactcctcactgggccaccagggtgacagggaaggatcccaactcttacccaatttatcaatggttgtgatcaagtcagagggcacaaaggaatctaggtctgcatccaggatgcccagggggtccagctgggccacatggtggcctcggatctaggaaaaggaagagtaataaggctggacagatatttgttccatgtgaggctcagaaccccaccccacttccagcttgggagttctgagctgtcacacatcctactgtggggtcgctcaccagtgaatcccctgctggcagacggtgggagcttcagctcaaacacacaatatgaggctggcaaatataagaaagacctacacacgaagttttgttttgttttgtttttttaaaggtttttcaagacagggtttctctgtgtagtcctagctgtcttggaactcactctgtaaaccaggctggcctcaaattcagaaatccgcctgcctctgcctcccaagtgctaggattaaaggcgtgcgccaccactgcccggccacacgaagttttatatgccatacaccattagtgtgaatttccaaagcgtctgacacatgaacaaggaaaacccacccaagagtgaggaaaattcccacctgctattatgaaaccatttccacaatctcccatacccgcagttgtgcatgaacaaacacaacagtaataaagaataataaggagaacatttaaaagatggagcagagggcttcaaaaattaatgcatataggcattatgagaaatcataaactaaaaagaaaccctgaagtaagaaaagttactgtacatagagatgggataatataggaattgtaaaagctggattgaagatataaagtttcaaagaaccaggctttttaagaataccttattttgggggctggcgagatggctcagtgggtaagagcacccgactgctcttccgaaggtccagagttcaaatcccagcaaccacatggtggctcacaaccatccccaacaagatctgactccctcttctggagtgtctgaagacagctacagtgtacttacatataatcaataaaaaaaaaaaaaataccttattttgaagatttgactttgaagccctataaacactttaattataaactaaattaagatgtaacatgaatagtaagatgtaacacgcagtgtacaccccagcagcgtgtctgtgcacagaaggaggtttccatctggccagtggaatattccctaaagacatgcagaactacggaggaaactcataaactttcctattgccaatcagtagcaacagtagggaattgttattctaagcctgttgcgtgtgggctatggaaacatcacatgagccaccgcatggcatctctgagaacatctattgttggcatctttgaaaggagaaggtgccgtaagacggatgaggtcaaacccttagtcctgcatttgaagtatagcgctgcattaaaataaatccataatgcatgctatctttctaaaatgcacacagctcccagctctcatcactgcaattgactcagaactcccaggaaacccaattccggaaaggggaaaaatataacactattctagttctttttctattggtataataaaacactgaccaaaaccaatttggggaggaaatggctatttagcctacagagccgggatgaaaggaggggaagccaggaattcaaggcaagaacggggaggcaagaactaagcagaaaccatggggatgatcccaggacaggagcactgcttactgccctgctcagcgacctttcctatacagcccagacccactgcccactgtcggctgagccctcttgtgtcaattagcaattaagaaaatgctccacagacttgtgcacaggccaatctgatcaaggcaatttctcagctaaagttctctttttcccaggtgtgtcaaattgacaaatgaagctaagtatgacaaaggggtgctagtcactgccagggctgggaataaagacactgtaaccatctaataggtttaacacttaagtgtgttcattcacatgaaactctaaaaaaaaaagaaagaaaaaaagaaagaaagaaagttaggtatggtggtgcatgcctataattgaacaatggaaggctgatgctggaagatcatgaattcaaaatcagcctaattagtagtgggaccgactattaagtgagaggaggaggaagaggaggaggaggagaaagaagaggaggagagagaagaggaggaggagggagaagaagagaagaggaggaagaggagaaggagaaagaggaggaggaagcagaggaggagtcgggagaagaggaagagaagaaagaggaggaggaggaggacaaagaggaggaggtagagaaagaggaggaggataaagaggaggaggtagagaaagaggaggaggacgagaaagaggaggaggaggagaaagaggaggaggaggagaaagaggaggaggataaagaggaggaggtagagaaagaggaggaggaggagaaagaggaggaggaggaggagaaagaggaggaggagagagaagaggaggcgggagaagaggaagagggagaagagaagagaaggagaaggaggacgacgacgacaaccttcactggttacttatgaaggatgcatgaaacatcttacttttgaaaatcagtcaataaaagggaaaataaagcaatccctaactaaccctgcctttgctgtgcaatgtgcacctcagtgtaccgtggacaaggggagctgtcctgcgacaagtacctcaggctgctcactgccctaaagccacaccaagaagctgattggggaaaatcaagtccacactaggtgaagcctctagagctcagatctcatttacatggacaaagggaccggggaaatgacaccatgggatcgggaaaatgacatcatgggagtggggcagagaagccccggctcagaaaacctctacaggaaaaacctggcaagaaatacaaaaaccagagatggagctgcagtaccagcccaggggagacacatcagccatggcaacgtgctgctttcttgtgaccttactgcaaacagggaatgcctaagtccacaagtcatgagcttggtactggctaatttaaaaaaaaaaaaaaaaaaaaattaagcaagccagatatggtggtgcatggctacatctcagcaagcgtgagacagaggcaagggcgtcaggagttcaaaggcatccctaactacagagttggtttgagaccagacttctgggctacaggacaatatgtacggaaagagaactcactggctaacagcatgagaaatgagttcaaatctccataaaccatataaacaacaaggcatgattttgtgggtccgcaacctccattaaaattagtggagtcagatggacccaaagagcttgctggctaaccattcctaccctaaacgaacaacctcgtggctcagtgagacactatctcgaggcaatacagaataggtaaagagaccaggcatcctgctctggcctctacacacacacacannnnnnnnnnnnnnnnnnnnnnnnnnnnnnnnnnnnnnnnnnnnnnnnnnnnnnnnnnnnnnnnnnnnnnnnnnnnnnnnnnnnnnnnnnnnnnnnnnnnnnnnnnnnnnnnnnnnnnnnnnnnnnnnnnnnnnnnnnnnnatggtggctcacaaccatccgtaacaagatctgaccccttcttctggagtgtctgaagacagctacaatgtacttacatataataaataaataaataaataaatctttaaaaaaaaaaaaaaaaaaagaaaacacaatgaactggaagatgccttattggaaatacttggggccagccgcatttggcatttcacactcttcttgatttggggatatttacacacataatggcatatgttggagaaagggctcaagtttaaacatgaaatgcgtttgtttccccagcaccttgtatgcagagctgaaatgtggttctgcacaatgttctcaggatgcctgcgttctgactacaacccgtcacaggagatgaggtgtggaactttccacttgtgacgtcacatcggtcctcaaaaagtctcagattttggagttcatcaatttttttttggatgctcagctggtataacagttactgtgctgcatgaagcccctgggtcctccggccagtaagagtcccctgtgacccttgggcaccaggtgctcggggaattctctcccattccacgctcccacacagaggatgcctagctggagacagcacactgtttccatttgccaatgccttgatgttcccaggtccatgtagtagctcgctgctcctcccactaggtctcttcaagggcccagaacccctcgaatcatcctctgcatgccacgtttcccttgtcaactgccttctgccactggttcccacagagatcctcaatagttgcacctgttacagcatcaataccagtgcaggcctccaattagtcctgttcagctgagagaacatggaccatcaccaagacacactgccaaccaccgggcccagcctagggaacccggtgtgagagagcctaggcctccagaatgagcagctggtgggggagctgtgtctagtaaattattaattcattccatcttcactaatgaagctcctgctgcaaacagtccccgtttcttggaatgcccggactagagagcggttatcaagcgtcggagtgctcctctgtcactgaaggctaaacgcaacctactaagtgcccctctaggtacttaggccatcatgtgcaagatgacaacagtgccgagaaacagacaagccaacaaaacaatacactcaaaagctctaaatggcacgtgacaaaggctggttatcagtggaggtgtcattatggctcagacaccctgcgccccgccccgcccccaatcctccatctctctcacctggtaggcccggatcagggactggactgccaagtggtcttccaccagcttgctggtcttggtgcagcttgacactgatgtcctgctttcttggagaacagctgggagctgcggctgagcaggacccacagaggcctccttacttgctctctgaaaaaagctgtcccaggactaggtagggaaggagaaagaacccagctgggtcaggtcgtgaagagctgggatccctaaagcattcagtgttcttggcaccacaatgctcagggactttgcagagcctccattcagggaacctctctactagcccaggtcccttacacaccccagctttcctcaggatgtgggttcagttataccaggaacatctgcccacatatgttagaaaattctttctacagccagctgtgtgcacagacacaagtatactctgcagcactcttcacagcaatcaagagaagatgtgaaccagaagtctgttactggggacaggtgacatccatgtgatagaatacttcgtaggcaggaacaaacaaacaaacaatggggctcttcttgtactgacatggaaagagctgagatcatcaaatgaaagccaaaaacaaaaccaaaaaaaacaacccagccaggatcattccttgtcacgctgatggaaaaggggggaaattctgttgtgtttgcaaacatttacagagaaaaaatctcagaaagagaagaaactaacagacaaaccctgtggcgggctaagagggacctcttgacttttcatgctgcttgcgtctggatcacatgacttttgctctttctcccatctcacttcttagatatcaaggcatattagcttatcagatgacacatctatatgcatttatttcttaatctcatgccaggagctatctggagagagttagcataaccaggcagggcaggtctctggcatatcaagcaggagctctctatggtccatcaagtgggatggactcacacactttcatcatcagtaagaaagcaagaagcctctcccttctcccccacacaatacacagagactgaggtcatggctggttctcacaatccctcatcctcccatcctcccatcctcccattcacccctgcagcttccttcccataaaatgcagaatgcaggtgccaaccttgtgaacgctctgtgggttttccaaccaggcaaagtacatctcttccacataactggagctgactccgcttctgctcctcgggatggtcgttggtggtccagaagacctcctgcacccactgaacaccgggatagcccgtgtggccaggagcttggtggcccgtggccccagccggaatggcagcagcctcagctggctcatcctgaacacggacaaagagaaagagagaaagaaacacaaatcacagaacccagtcaagaggaagctcggatatgtccgagttcactcctaacccctatggtcccatggaaaggtggcctcagactaagccaaggtgagacacaggggacacactcctatctcattgagcttcatttccaagcaagaggtctcagctcagtaaccttctcccaaggactccgaaacccagtgcccctacccttccgtccagctcccctatacacaaccctgcttcagggggaacctagctcaggccctggagcccactcagaagatcatggcagtaaccaaaaaaaaaaaaggatgggcacatagcctatcaccctggaaatggggcgggggtcctccaggcgctgagttggctgtacatggtcagaaaaggcagggaagggcgttgaggagcaaaggctcagaaagatgatgtgctggctagttttgtgtcaacttgacacagctggagttatcacagagaaaggagcttcagttgaggaaatgcctccatgagatacaactgtaaggcattttctcaattagtgatcaagggggaaaggccccttgtgggtggtgccatctctgggctggtagtcttgagttctataagagagcaggctgagcaagccaggggaagcaagccagtaaagaacatccctccatggcttctgcatcagctcctgcttcctgccctgcttgagttccagtcctgacatcctttggtgatcaatagcaatgtggaaagtgtaagctgaataaaccctttcctccccaactgcttcttggtcatgatgtttgtgcaggaatagaaaccctgactaagacagatgagaaaggacaagacccactatccctggagtctctgatcactggccagaagtgactggtgactcattaggagtgcaatactaagtcagggtatccctcctcctgggcaaagccagaggtcaggaacccagactcaaccttagccccacttcacagaagtgaggactgaggctccctgtggtggaaagagaactgaagccagcccagtggtagatccctgctacagctgccttctgtggttcccaaaagcgacctagaactcacactctggacaaacgccacccaaggtcgctgtcatcccagggtacttacaggtcggggccacccaggtcaggaaaacagaatactgggttctcttcacttgttaaattacctgccccttcccaaggaagaaacctaaatagtgggcaggctttcaatgggcctctccccaaaacccccccaggagttttaaaggtctcctctacttgtagagaactaccaggctccctgctcagacctactgagccccctgctgtcccagggtcctaccaccacaagtaaagtgggacctctgttgtccttcctttccccatggctttgagtgggcggtcctctcctgtcccatccagtccagccccagcctccacggggtagatcctccaggaagcagatccttcctactgaagactgagtagtgttcttctgcctggggagtccacgcttcagtatagagtgcagccctagaactacccatcagagtccatggcccttatacaactccctgacccaggacacttacagtctagggtatgtggtcttggttagaactagttccgagtcaatgtgtgtccagccaactgtccaccagctgcatccctccaccctacccctgccaccagctaaaccaagtcaggatgccactggctggagttcttgcaaaggttcaagtccaccaaagggcaggcatggctcttctaggctgcctcccctcacccttgcaaactcacttgagctgaaggggcaggtgagttcctcagccaaggaatggtgatttcctgaggtgacctgtggcaagtctgaattagaagaaaattaataactagaaaagacattctagaggggggtgtggcagaactctgaacctcaggtgccccaggattcccttctaacattccaacccctgagctaatgtagccaggtcccttagtgagccacttggggctgggtctcctggagcagcagtaagtttccaaaggttcagcatgggccctagggtcaaatgtggaacaaccatgggggatcagcatccgcattccacacagtaagggtacacagtcaggagcacagaggcgagcactgaactggagagtgacccgctgtctgttccagggcctgtgtcttcctcatggccgcttaatatctccttgggacaatgccccaactgctccttctgccagctttacccccacaaggtgataggacaatccaggccagatagggacaaggcctggctatatccagcctggcccagtgttggaacactgtgttttacaaatacagaacgctctgggcagccagatactgctatggccttcacccaacccggcaggagatgccagccattcctacccccatgccagctgggcttgaggaccccagagctttgctgagctccaaatctatagccaaggccctaattaaccctgttaggtcctgctcatacagggcaggatggcggcaagcacaccctaaaacgtgccctgtgcaagtttctagtgggaagatcttgggggcatcctttttggaacaatgtcatccagtcagaaccagggcaggcaacttaatactaagtctcctgcagtggtgcacaggggagggctgctctgtaaactgcccttgggaaaatcagttagtagaggtcagagtagggaggcccccttccctccaaaccctgaagcagcacgcagtagcagagtctttctacctgtcttgtactagaaactgaactcactgcctgactggaaaatgtagaactccaaagagctaggcagaagggtgtgatgggggtcggggtgcaagcttactttcttgacagggaggaaggaagggccaaactaaagcccagaactggggtgtgtacaaagatgggtaaggtctgttgaaggttactggtggatggagaggaaatacacagattggcttgggattggagcccgtagggctgggggtttcagcgctgggtctttgcagagcatggtccttagggtcaatcagataagtcctcttagggctcatcctgagtgcgggaggatggctgagacctcaaactacttgacctagatatctggtcggcctccatttcctcaagtgggagcacagaccgcagttaaaaacaagtatagggcctgtcctgggacttcgaagctgcttgcatgtcccgccagatgcaaccctggaacctcttcaatctcagtgctgttctgggcagcccccctctccttggaagagtaccaggcaggctcctctccaggccactacggcaaacagtgggggggggggggggggggnnnnnnnnnnnnnnnnnnnnnnnnnnnnnnnnnnnnnnnnnnnnnnnnnnnnnnnnnnnnnnnnnnnnnnnnnnnnnnnnnnnnnnnnnnnnnnnnnnnnagccccactattggcaagtcactccttcccacgaaatctgcattcacctgctgacaagcacaaaggaccgggggtcctaaggaacgctgcacttagtctagggagagaccaaggtcaagttcccgttccccacaccccaccccaccccctccccaagggcctggctgaggttagtgggcagcgctgccccaggacctaggatcgagttgcagagggttcagctcgcaggaacgggggtcgcgccgccgctctcaccggctggccgaggttccgggccacgcggtccggggggctgaaggtccggggactgagcggagggtcacgagcagcgcgctgtatcaattacctaggtcacgtgacacggccgccgtgagcgcgcaccctcgggattccgcgcgtcgtgacgtctcggtagacgccccgccctgtctgcggccctcgctgtccgaggtgctgacctcccagatccaagacctcatgtggcccccaaagagccaggtgcttccagatggccagcaggagcccaggtctgccctgtctgagtgactggagacagtgctggacccatgaaccccagagtcctcgacctgaaactaagaggaacgtaccagaataaagcagacttgtatgtgtgtatgggggaaagatagattcctctctatcacccataaaatgggaatgctattaaaagttctgctgtcttccagctgttttgaagaaaggatgaagcagtttatgaaaaaatgcttagtgccctaccaattcactttccaagggattgtggcctggtttccctctcctcagagaatcattgccacagacaatctaacaaagaatatacattgacagaacctgtggaaatttaatctgcacttttattattagtgatttgccaacttatgttattggtcagtttggagtttttctgatgtgttcctgcctttttcttttctgtattgggctctgtttcatttctaagcaaatgcaggatacacccgtggctggaaatgctatcagcagtccttcacaggattactgtaacagcccctaactggcttctgtgtttgcatcccttaatcctgacccagcagagcagctagggacttcctgtggagcacagcttcatgtcacagtttgtacaatcatctttctacgtagctgtttaagatccactgatcctaagcaaactgtggataattgaccttgtggttttttgagtgttccatctgaaggctcctatatcacataaaaccataatcaaatgacgttttatgtttgtctcttgacaacctgtccttgatttacaggagtctgggccagcatcctttgtgagaagcaggaaaggaatcacccctttcccttcccttcaaggtaataaatacctgtaattccagtaccatgaaggctaaggcaggatagttaagagttcaaggccaggctgaaatacatattgagaacctgtctcaaaacaactcccagattctgtccaggagactctaggcagctatgaatgtccaaggttgcatttttgaactccttttctggcaagtgtgggggaaatggagggtaaaatgtgaaagtgtgcgttgtcttgagtggggggacaatcaagcactgctagagaagaagccgggacagatctgatagtgagttggaagccagtctgggagatcagtggcttgcggggtgtttggtagggtgtgagtaacatgcatttctggctttcttgactggagttcattgagtaggaagcaggtaagccgtgttgagaggcacatcagagaagtttacaactgagagtcaatcatgaatgaatgacccaagaaggtaagttaacctgtgtccacaggcagggcaacggcctagccaatcagaaggcttcagaactttctgtttgtttatagccctttgcaaagctctaagtgggacaaagagatggatccacatcctggagggaaggtgagtcactcatagaatgggatggggaagagactgccaaggacaggaacctctgcctgggaagcctgctggtagatcagccttctcttctgattgttgttctgctaattacagcaattgaagcaattattcgggtgcaatcaagactctcataaggtggctgccattcttaggagcctgggaggacttaaggcagggactggagctctgcaaaaatcttggcagcagagacctgtctttgcttcctcgggtgtgggatacagacacatatgtttactcattctgatagtatggactagttcattgagaaatatgaagcatatagtggtaaagtcccacatcaattaggactcaagaaaatgccccaccgacatgccatgcccacagccttatctgatgaaggcaatttctcgattgagggttccacttgccagaggactctagtttgtaccaagttggcaaacacaacgtgttaaggtttacactgtgtccctgcttccaaatttgtaatatgaagtcctaaccccaggtacctcagaatgtcactacctttagagatcagtatttaagaggaaattgtgttaaagcgtgggcattgcaatggctctaatcaagtaggactagtataaatatatccgtataagtagaggaaattcaggcacagacactgaagtggaaattgctggtttctttggagactcagttgtatcatgtgatgttttcctggaaactgtcttatgataggatgtttttgctgaagcagacatgtgggaggatgttttgctgagaacagacacatggtgctttcctggaagctgcctgggaaaagggcatgtgatgttctgctagagtggacacttgagggaataagtggtgtttggaaatggtacaaatatagcccaacaaacaatggacaatggcaatgacgactacaacaacaacgatgacaacgataacaatgaagctgtattggtttgccttgccaccctttgctgatcattgttttgtttgttgtgatttttagagagaaatgcacaaaagaagttctagtggtgttcctgaggctgcagcttcttggactctggctgattggcagaatctctcaatttcttctagatggaattgccattgctgattcatgaatagtgtttgtgagtggcttgaactaccactgctgattcatgtgaattgaactgctgatatcccgacaacacagattggattcgcccgaaagaacaatttcaaaatgggtccatatcctcctttgccctgttaacctttcctttccactcccctggtgggtgggtgggctagaagggaggttaaagcatttaagtgtacgtattaaagtaggttttgaaaaatagaagcctacagacacagagagggtaaagcatgtgagacagaagagaaagataacatctgccagtggagaagaaaggccttgggagaacagccttgcattgccttgaagatggtgaagacaggagtgtggcctgctggtacaacctgcctaggacatttgtcagcggagcacaccagtgtgaggtcgtatgcaacctctgctgcccgacttgagccccacttaggatgtgatttcctctctgtccctgcttcccctttcttcctgattactgggtctgcatgcagggtcactcccaagaagaatagggcagcccccatcacacagacagtttctgtgcattctctctcccgctcttccaccagcccattagcttaccattgtgaagaggcgtggcgaaggaacaggtcaccactcagaagcaaatgctatgggctctttttttttggactaatttttgtcttcatctttatttttttagaaagttcaaagacaatttcatttgaatttaaaagaaaaacacccaaggccgctgagcagtagctctcagcagctacgccaaggaggagaatgagagagagagagagagagagagagagagagagagagagagagagagagagagagagagagaagtggaaggggaaagccatgccacgtgagctggtgtggaggtcagacacaaggtgcacaagtagacaggtggtggtggtggtggtgctgtctttattgcctaaagatgtggccagcaactgaaagagacagaaaaaaaaaaaaaagagggaaggaaagttgacccctcctaagtcagggaaggtgacagacccagctgaatttcacagtggctgtgctctggggacaagctggagggggtattctagaaagcaaaagcacagtttctcagtgtggtgccttgaatatgattggcccaggggaagcggcaccattaggaggtgtggccttattggaggaggtgtggccttgttagaggaagtgtgtcactgtgggggcgggctttgagggcttctgaactcaagctctgcccagtgggaaaagagagagccagtcttctcctgtttgctttccgaacaagatgtaaaaccctcagctcctccaacgccatgcctcccatcatgatgataatggactgaacctcagaaccagtaagccagtcccaattaaatgttgctctttgccttgattgtggtgtctctttacagcaatggaaaccctaactatgacactcagtaaacaaaaatatcccacgtctttctttagcatgacttaatgtgagctcactttcctaggggtggtccccttgtcaggtggttaacttggcctaacgagaatgttaggtgtccactcaggccagcgattctattctattgacctgatggagtttttccttaaagggcatttattggtgccctaacattccctcattgggagagtaacctttaaatcattcaggatccagatcaggaatcagagccccaaacacttgggccatcgctggcctctgactcacttttcttttttaagtatcatttatgtaaagagtagaaatacttttcataacataaagcaatttctgatactattaaatattcagtagccatgattttaatgattgagcatgtatcattgtataaaccgttcctttagtgcagattgctaccgtgcatcccactgtgatcagaagtcagtttgcttgctttatcacttccttgactcccattcccaacccgatgccaggtcacctacaggacactgtgcagggttcagtattttaaatctttgctctatctaagagtcaggacactgacacagtgagctgagctctggactgagctggcccaggactggggttactggatccacgtcacctccaactgctgccgttcaagaatagcctatacaaacaatcctggaataagatgggacatgttgagtgtgtttgaggcctgcagaggcctttcttctacctcaggtgagctctaactcgggagctacggtgctagatgctcatggactcacaagatttcccttgagttagtagattctgtgatcttccctcatacattcaaatggaactcatggaccctttgggttattccatagtcccctgatacctagctgaccttggagggcaaaggtcaaaataatgtcccttttagtccctctgtccacattagtacaggcttctgggggttgttattgaacattcatgtcagttataccctatatagttatactttatataaatgtatagttatacctgtctggcacttttagaactatataacatttagataaaggttgaacaaaaaccatatacttctaaataaatctcaattttgttaagattcattttttatgtagttttactttggttaaattgacctatacctcctgtcttttaagatagttgtgggttggagagcagggtggggaagggtaatagggggctttggggataacatttgaaatgtaaatgaagaaaatatctaataaaaaaaaaagatagttgtgacaaatgttgccatgaccagaataaataataataaagtaccattaactgaaatagaacttcacttgaactttgaccttagacattttagtaacctttaatcatcatacatgtatcatctctaagtcttatcttttacataccttatgtagcttagaccttctgggacttatttgcgctttattcaaagtttaaaagatatttactgtgtgtgtgtgtgtgtgtgtgtgcacataggggcatgtacatgtgaatgtcacatgtgtgcaagtgtccagggaggccagaagagtgaatcagatcctccggagtggacaccaaacttatgtcctctgcaagagaaagacgtgttcctaaccactgagcctcctctccagtcccttgtttctggtttctaacagtttctatgtctttttaattttggaaaagtctagccctcttaatttcaggccaaagatatctttatttctacatcctttcatcatttacttcttgtatttgttggttcctttttattttcctaacatcacgaggcacggtcaatactaaccaacagacatgccattttactggaaacaagttaaatcaaaatcacacagatagcataatgtaataaaattagattacctgtatacatatgtaaaactgtgaagcttaagaagttccagagcaaatctcatcaagaaaaagatagccaaaagtcaccttaggttcagtacaatctagaaaatgatctaccacaaacatgcctttggctttgaatgagttagtttattaagtacatgggaaacgagtggcgggtagccagggaaacatctttaaatccacgtgcataacagtcagcagaaatcagaaagccccattgaaccacaattacagtcacagccaagtgagcactgcctgatgccttgggaacggggacaacgtattgacaagaagtaaagaatagtttctttcccagaatctggaaagggaggagcaattgattttgaagtctctcctcagcaatctttaatttttttagggtcatgagcgagtaactgctagcacccgtaatcaagaaggatcaggctaacaggaatgtgttgtctttcccacttctaatactccctggctagacctgggggatgaccaagcgcctaaaagcctgaaggtgaaatcaggtagctctaggatgcaaggggaggcaggtaacctgaaaaacgtagtgagtaccttccttcctccagaacaatcaagctgtaagggaatagaaaactatgtttgatattttcctctattattaatcctccagcttaatttgagaccaatttcaaagtgcaaaaagtatgagggttttgttttgttttgttttaggtaatcatgtcttttactaatacctatttccgtgttaaggtccaaatcaaactgatactgtctaggaccttgttatgccaccccctacaaaccgcacaagacagactgatgatatagtggatatatagggacctctttcaaatccctttactaccttctccatatcttatcttttcttcctccctatgaacaaccaggaggaaaggaaaagctagttgggctagccacactaaaggagagactgttcctctcctctcacatcaggagggttttaactcaggagtcagctgcagtacgctcacagtcacacacaatttcaataggtcactgacctctgagttcctgtctcatggattcaaagaatgagtcccacggaaagaggatggtgagttttagggtgaaatgtttttagatcccagactagatgcggatcaggtcagacccacgaggagctgatttttgcatacagtctcaggctcccaggggctgctgatgccacgcatgaagtgaggaatacacattaactgaataggtctctcattcccactctcattcccactcaaaaccctaagaccacattccttccttgggaacacgaaatctcttatttctctgctgcccaagaatcagagccagactcaccacaagggtcctgtcttagttagggttttactgctgtgacacacaccatgaccaaggcaagtcttataaggacagcatttaattggggctggcttacaggttcagaggttcagtccattatcatcaaggtgggagcatggcagcatccaggcaggcatggttcaggaggagctgagagttctacatcttcatctgaaagttgctagaagattgatttccaggcagctaggatgaaggtttaaaacctcnnnnnnnnnnnnnnnnnnnnnnnnnnnnnnnnnnnnnnnnnnnnnnnnnnnnnnnnnnnnnnnnnnnnnnnnnnnnnnnnnnnnnnnnnnnnnnnnnnnnaccaggcatattcaaaccgcggtaataaagtcctgttatgaactattcatcacccacatggcatggagtcttcccccatggttgtgaaacttgtaataagggactaccactttgccttggtccagaactctcctcaaatttcatgccatggttcttaaaactctcgtaataaatttcttgcacaagagaataatctgtcacagtgtcccactccaactgtaacccaaagatgcttcaagtttatcttggacttataggcagaaacttagagggttgggcaggactcctatatagcaggagggtgcccaggaatggactaccattaagttgctaagcattttaaaggacttatggcagaaactgtctgtatgtgtctgtatgtctgtgtgcctttatgtgtgtctgtctgtgtgtatatgtctgtgtgtatatgtctgcgtatatgtctgtgtgtcttgtatgtctatgtgtctgcatgtctgtctctgtgtctgtatgtctatatgtctatgtgtgtttgtgtgtctatctgaatgtgtgtctgtgtgtgtctgtatctctgtgaggcctgtctgactggcgtgtctgtatctgtgtgtgtgtttgtctgactgtgtgtctgtgtatgtgcctgtatgtgtgtgtgtctgagtcagtgcatctcttctgaccttttcccagtgtggccacattgagtaagtcttctttccattattaatttgactcattgattagcttatcaagggcagtaatcaagtgtagcttgctctgagtcagagctcaatagcaccacagccttgctaggcaagtgttctattactgagttccagccatgtcctatcccatacattttcacatcactagacgttctgagtacatttcctcccacttccccttgaaggctatattatatttaaaaacccaccattaattttgagataatatttgtataaggagtgacccttaggttgagctttgtctttgagtttcaaggcatgtccagttgctccatccatttcaaccatttgtttatgacttgtctttcctgcattgaatttcttctgtgcttttgtcaaaaactgatttgggcatatctatgtggttcctttttctgaggttagttttactgagatataattcacatgctagtcaagccatcagtttaaaatgtgcctttggtggttgttagtgtagtatcctcagagttgtgaggatatactacacccagtgcaactattagagggtgtccacggtaggcagatagttgtttgacttcagaggaggcctcttctcttctcaggtagtatttaactccagaattagggtgccagatgttgacagtcacacaaaccggccactgcatgggtggcttccaggttcttttcttgagaatttgaggaccgaaatttatggaccacaaagggtgaattttagaaaggagtttattatagagtcataggctgctgcttacaggggtgggttgggctcctgatagcagaaggggatcccaagaaataggctcccttggagctgctagttcaagggctttttaaggagcttttggcagagactgggcataagaataggcagaggaatgggccggggtttgagctggtcagtctgatccgcacaagcacatggttcgggtgcctccactcagttttgtccacatcctcacatagaacatgagagaagagaagggacattcttccagcatcctggcttccagcaagggtgttacctacctgcttctttggggtccctacctaacctgagcagtgtctatcttgtaaaataatttgccaaagaatgataccctggactcaaatagtgtgtgttatgatcttgaatgtcgcgtggcttcagaaggactacaccaggccaaacagttccacgtgaggtttattgggagagagaggggcaaggtggcgatggaaagagaagggggtaggagagagagagagagatcaggggaacttttctttatatatgggtgatgacgtaacacaggtaaaggagagaggtgagccaagtggattctgggaatatggtagctgttgccttggcaataggcctgcaggtcccacatatgtgatgtcacaggtttcagaggtcctgataccaacagtatataaatgcaaagagtgttttattctgtctaacatgctggggtttccccattaccaagatagagagacacccaagtgatctcgcaggcccaatttaaagcacattagagaatgtctggataggtgacctttatgttaatctgttgggcccatctctccagacattccattatcagggtgtgggagctagaaactttctggggaggtctgggaactggtgctgacccattgtccttacctcagagggcagggacattccattacctgggtgtaaaggctggatctttttgctgttgttgttgttagtatctgacttgcttgggcttgcgtggacttgtccagttcttaggcctagtctccttaactgccaatcagaagcctgccatggagtcagcctgcctcattcctctaaatctcctatcatgagtgtggtcctcccttgacaggcctgtgatgtgaggagctaagctctcctgaagttctccaggccaacactgccattgatgggtctcattannnnnnnnnnnnnnnnnnnnnnnnnnnnnnnnnnnnnnnnnnnnnnnnnnnnnnnnnnnnnnnnnnnnnnnnnnnnnnnnnnnnnnnnnnnnnnnnnnnnnnnnnnnnnnnnnnnnnnnnnnnnnnnnnnnnnnnnnnnnnnnnnnnnnnnnnnnnnnnnnnnnnnnnnnnnnnnnnnnnnnnnnnnnnnnnnnnnnnnnnnnnnnnnnnnnnnnnnnnnnnnnnnnnnnnnnnnnnnnnnnnnnnnnnnnnnnnnnnnnnnnnnnnnnnnnnnnnnnnnnnnnnnnnnnnnnnnnnnnnnnnnnnnnnnnnnnnnnnnnnnnnnnnnnnnnnnnnnnnnnnnnnnnnnnnnnnnnnnnnnnnnnnnnnnnnnnnnnnnnnnnnnnnnnnnnnnnnnnnnnnnnnnnnnnnnnnnnnnnnnnnnnnnnnnnnnnnnnnnnnnnnnnnnnnnnnnnnnnnnnnnnnnnnnnnnnnnnnnnnnnnnnnnnnnnnnnnnnnnnnnnnnnnnnnnnnnnnnnnnnnnnnnnnnnnnnnnnnnnnnnnnnnnnnnnnnnnnnnnnnnnnnnnnnnnnnnnnnnnnnnnnnnnnnnnnnnnnnnnnnnnnnnnnnnnnnnnnnnnnnnnnnnnnnnnnnnnnnnnnnnnnnnnnnnnnnnnnnnnnnnnnnnnnnnnnnnnnnnnnnnnnnnnnnnnnnnnnnnnnnnnnnnnnnnnnnnnnnnnnnnnnnnnnnnnnnnnnnnnnnnnnnnnnnnnnnnnnnnnnnnnnnnnnnnnnnnnnnnnnnnnnnnnnnnnnnnnnnnnnnnnnnnnnnnnnnnnnnnnnnnnnnnnnnnnnnnnnnnnnnnnnnnnnnnnnnnnnnnnnnnnnnnnnnnnnnnnnnnnnnnnnnnnnnnnnnnnnnnnnnnnnnnnnnnnnnnnnnnnnnnnnnnnnnnnnnnnnnnnnnnnnnnnnnnnnnnnnnnnnnnnnnnnnnnnnnnncagcaactgcctcctaagttgggtcccccagagagcagccctgagtccatttcttgggccccctttaaggaataaaatcaatcatgagtagttgcaaagcaggtttgcagagggagacagtgtggcaataaggaaaagcaaccgtggaagttaagcggcctttgtgctggggtcctctaggatgaacgagagttttcaggtagatgcgctcgagtacagaggcagacgtggtctgaaaggtgctcaggtacccttgatatgaacactggaggagggtacagggctgggctctcaggagagcagggtttgggggtgggttgagggcagagctgccctgtggttcctgcacggttctgctccaagtctccttccttggactgcccttgggcgccctctaggaggaactccccaaagtgcagtggggtactgtgccagccctgagtgataggcattgtccttgtgcaggttttccatggcacaccctcagcaggccacagctatgcccagcggtggtggtggacggttgtgtgatagtgggtgttagcaaggcagccctcactgctgcatctcagagttcacaaactttccagagtgacggttatgcctgcagtatgaggaagctaacaggacagagagagaagccaggagtctcacactgcacaatggtgactggcagagtattatgcctggagaccccagccctttatatctcttgggaagggcaaacaaaccaggcccggggcttcctggaccagagggactgttacacacaaaggcctgcaggcagcaagagtctgacatattctgggagatagggttgtctggccaggcatcaggggctaggagttagccaggccttaccaggggactttggcatgcccagagctccgtggagcccattcagggttcaatgaaggacaagtcagtctattttggaaagatcactcctgaagttcctcaaagaccagtaggagacccaatgaaggtgaagaaggggcttccctaatgaaggactctagggaagaaaggctgtaccagtggggcagacgaggagaaatgggaaacagtggtaggggtatcgcggttggaaacatactggtaccaagatgataagaggcagcatgccttccagaggcctagaggtgcatcnnnnnnnnnnnnnnnnnnnnnnnnnnnnnnnnnnnnnnnnnnnnnnnnnnnnnnnnnnnnnnnnnnnnnnnnnnnnnnnnnnnnnnnnnnnnnnnnnnnnagaggcttagaggtgcatcagccctgccacccactgtgggggaggggtgcagggctgagcttatcatgtatttgagaaaaaaagaactattttctcaggaccctgagagtacaagtcaagagcttacccaaggggcccttgcttgggagataggtgccctgatatagtttacttctagctaggtccaggagccttaggccctggaggggcagggtgacagaaagagacctgagaagactgaagggacaccaaagtgattggcaaagcagcctaaagcacagggtctctcccatgagctggttctagcatcaggactgtctttttatagtgcagcctcaagacttgcttgttacagaagttcaaaggcacagaaagacataaaagacaaaatttcacattccaaccctcagttgagtttttaaggtaacattttcctttgtctttgttatgggtttcaaaggtttgacaaagctgtaactgttattgccacaatttcagtctcccttcatttaaaatgaccaggagacattctcaccacgtcatgaactcctgggtcagctaaacatcagcattggacaggtcacttaaagagctggcctgccaggtttaaggtaggttctgagccccagattctagggactctacaaatgataaatgcaagtgccactggcattgcagaactttagcgctggttggcttgcactagcccttttttttttttcttctgcaaactctttaggcaattgtaagcacggtgacttagaaaccccagaagtgtaattaacttccaggggaagcaaggaggaagtgtgggctgtagttaataagactgggctaggctcccacattctatgaagcgtgtgggctagagatgagggccttagggaataatcaatgccattgttgcttgagcttagattgatttcataaacaagaactgagctactggaatatccgatagggccaacaccttgctatttaaactaagaaaagattgcaacacattctctaccattgtccagaagaggtaaggacacatttatcatcattcacgtcatgatgacagtaagaaggaagagctttctgggccccttgggaaacagctcccatgtttctgcccccctgagattcaggagtagattgctcagcatcttccaggagctcagcttcatcgttgcctgtatgctggctactgaggacgtggtaccctggcattacttgggagcctgtcggcagcacaggatctctcagtcttgacttagcattcccattaatacacacattatattagatgccagaggcactgctctcaagaatccaagaatcctgcatccctgtacagagaaaccaaggctggcagcaaaaggtcacttcgaggggatcggcttggtgccttaacagtcactgggttcatcttgaaacttaagaattccagttggggggtatcttgccttctgccccttgtcaggaggtaattattcttccaattacaactctgcagcattttttattatgacttttatggaggatcgcaggactatgaggtgtgaaggtcttgcctatgcatgattctcaggcaaaccatgtcttcttaagatggtctgtggtaaaatgactatgcatgttaatttaaaatgaaactttatactcagctacccacagatgcacaagtcatcccgagagccacagaggtaattcaagttttggagtccttgaagccttacagataacatggcggtcctcctagaggttagatgtgagcaattgcgtccgctcacttggcttctggccacactggggagaggaaggaaagcaggaacaacagagaaatgatgaaatcagaaggaaccctctagaattctaccgaatcccaggatcttcacataggtacaatctcaagatcgcctctccttgtgtccgcctgggcccactgttcaatggccctgtggctggggcacacacctgttccagtgataatgatgttagaccctgagcatcttccctcccacttatagcatggagaattctgaccattctgtgattcccagaagcctctgcatgcaggtgtccgttctattgtctgtgatcctcagggctagaagaccacattttctgaaggtgagcttgcccctgtaccagttgtggccattgaggacaagaccctggcattggccattttcctccacaaactccctttacctggaaaaaaaaatgtattatatgtattgtttttatgtctgtagttagcatatactcattgtaatggtgatgggactcataaagacatttacattcaagcttgctgtgtatcccgaccatatcactggacagctctcctccgttctcctcccccactctcccttctacttttatgtatttcatagatttgtgatcgctacattggaagaaacagtttaaag

SEQ ID NO: 23 - DNA, 235505 bp, Artificial
  Synthetic Bacterial Artificial Chromosome (Drd4_ftTA)
  misc_feature (97798)..(97799): n is a, c, g, or t
agccccagctcacccttctcttgacggctttgttattgtttcttctccttgaggtgagggcttgcctcagttctaatcctctaacttttttcttttttcaaacagtctcaagtaacccaggctgacctaaaacttgctatatagccaaggctgacctcaaattcctttttatacttttatttatagttatttatttatggctatggttattttgcctgcatgtatgtcactgcaccatatgcatgcctgatgctctcagaggccagaagagggtatcgggtccccgggaactggagctttagagtcatgagttgccatattgatgttgggaattgaactctggttcactagaggaacagccagcgctcttcagcacccggccttgaattcttcatcttcctgtctctgcttctacatcttaagtgctgagaatacaggcgtgggccaaggtgcctggcttggttggttggttggttggttggttggttggttggttggttggtttgtatgttttggctttttgagacagggtttctctgggtatcctgactgtcctggaattattctctctgttagatcagctgtccttgagagacccacctacgtctgcctccagagtgctgggattaaaggcatgaggcaccataccctgcttgttttatttaaaaataagggggagtgtctcactaggttgttcaggctagccttgaactgtggtcatgatgttatctccctcagcttcctgaactgcaggcaagacaagtatacaccataacgggtatacaggtatacaccatacctggctagtttaacttttcaaaatctagccttttctttgtgtctgttacaagactctacaaatggtatatgcctttttttttttttttgccatcaactcttaagaattttacagttttcctattattacaaggtatagcaaaatctatttcctaatacttactcttctacaacaacaagaattcatctttagctggatatgtggcccaccaaaagcaatggaagctgcctgactccttgaagctcaacccagtcatggaactctttttctgagcttcagatgcaggaagaaatggacaagctctgaaaaggaatgtaggaaaacaacactaaactgcctcagctccaagcaaactgaaggcgcctctcagacgctgatgtgagctacagaccacagaccggcgtgacaaaactaaaactaactgtctgtgacagagttgaaaagctagacagtgcggcacttaggagcacttgccgctctcccagaggacctgaatttggttcccagcagttatgtcaggtagctaacaaccatctttaactccagctccaggtagaggtctaacattcttctggtctgccagggcatcttcacacacaaggcatacactcagagacacatacacataagaaaaacagatcttgtttaaaggatcccaaaggaaggacaaaaccagttccaacaagttgtcttctaatctccacatggatgccatggtgtcatatatacgagtacacacacacacacacccacacacacacagagagagagagagagagagacagagagagagatttaaggcaactgactttgaagggcaaagactagaagtaaatgtacagcaagagcagaaaacaagccccagataggctgcatggaggatgagtccttaccgaaaggactgagggccatgagacacagaggtagttcatgaagcctgaggtcagggggcaattgtactaccaggcaaaggaagagcattacagcaagagagagcaaggacagatccttagacacagaagctgtgtgcatttccaggaagaggtctcatgggtatagtaggccactgtgggagggaaaggcacagataacaggaagaactgggccaaggcagcagcctggaggcagttcctcatggtcgatctggtatgtctcaggctggccctgacctttctaacaagctgtgggtgccaagcacccagcatgctcgggaaggggtcccaatactccagggacctctgtgcccacagacatgagctcttccaggaacatatttgaactatacccatgatgctacagcagggaaagatgcggagtagagatctctggagcccatcagctggaagctaccataagtaatcacaactatccctgctcccaagggcagcaagagtgggtagtagcatggcataggcttctgttggctaaagaaaaccccatgacagcactggatcacttacagtagtttttattgtcactggtgtggcttaatacctggcaagaagcaacttaaaagaagagaggtttatttggttcatgatttagggaatacaccatcaaggcagggaacgcacggtggcatgagcagctcatatcagtggaagtggaagtttgctcacatctaagcagattacaaagcagaaagtggagcaccagcaatcagctggctttctcctttccctcatcttattttcttcaggatccctgcccatgaggcgattccccccaacttcagggtggctcttccctccttagttaaatctttctggaaatgccttcacagacacacgctcccagtgtgtctcctaagtgattctaactccagtcaagttgacattgaagtcaaccaccactctgcctgccttctgcagagacctgggcacttcgctgggccacctgcaggtgctgtggctggctcgctgtggcctgactgacttggatggcattggctccttcttggaactgaaggtgagtctgtagcacttggggtcaaggaatggagatgaggacagaccccagctgaggtcccccatgtgaccctcaggaactttatgtctcctacaacaacatctcggacctgagcccactgtgcctgctcgagcagctagaggtgctggacctggagggcaacaatgtggaggacctggggcagatgcggtacctgcagctgtgcccacgcttggccatgctcacactggaggggaatctggtgtgcctgaagccagatcctggcccttccaacaaggtgtgtatgctgaacacccagtcagcatatatttgggaggggcccccacagaatggggacctctaggcccacgtgtaccttctggcttgttctctgtgagatctatcacttctgttactggaggcctacacagccgaagtctgttttgaactatcaggtatgtgcaagctcctttatagcaggtgactccacatgcatcccacacaggccacacatgctccaagctcaccgtctacctcaatggctgctgcttggtgttgacccatgatcagctccacatgctggagggcttcttgaaccttggccacgggcttcagggatgaggggacacattctgagaggatgaaattccagcccctgtaggccttaggctctagtaggatgaggcaggatcacctttgtcccgtaccatagcggtctggaagagggagtcccagaaacagttgacctatggggcccgcgagacttcccggcctaccgacccctctctccctccaggcgccccagggctacaactacagagcagaggtaaagaagctcatcccccagctgcacgtccttgacgaggtgcccactacatgcaccagtgcgcctgcgccccagacgctgagccaggactggctgatggtgaaggaagccatcaaggaaggcagcgtgcttgacattctcctccctcggctgggtaggccagacacttactgcagatgtcggtactagcctcaacccctgactcctccaggaagtcaggcctccaccagtaccccaagaggacaggcttccttgaaccccaggaaaaaagacctccattagttccccaggcctttcagagacggggactgcactttattctctttcccagccttatctccccagacccatgcacactggcccaggtcaagatattcccatgagcagcgacagttggcctcctgtcctatgctgagggagaggagggtctgaggctgtggatctttctggaaggaaaaggaactattacaggacagccctgggtcacacggctccttgaatgacagggttgtgctctgtggtctgaatttgaagcatgctggctagcatgagcccagtcatctctggttctaaccctggacagatgatccccatggagccaccattcggaaatttgacccaaccttgcctgtgcctgagacccagccatgggccttgtccctgctggtccctgggggccccttgcctgaaggtctgctttctgagaacccagccacagaagaccatgccagcaacctcacccatggtaactgaacctctatgtcccagagctgaccctacagtaccttgaccccaaaccatagccatactttcttcttcaggtcctggtcaagttctctgtgggaaccccaccaaaggccttcggaaacgtagaaaccagtaccaggtatgccctttccacgctccaaagtaggtgaggactgtagccctccttcctacagtagactatcaccctttgccctcagcccacactatacaatcatctgaaatccttctcctgaattcgaccaccacccatagcttcccccaccatatatcagtgtccaggactcctggcatgcccatgctctggccctcccattccagggtcagggttcccataccagccctttccctccctaggaatgggcacccctggaacagatgcccccacataggccagatctggccatcagaccctccaccccaaggcctgaccctgcagaaagctgtgacctggccatgactgggcttcgggcttggacggagcctggcctgcggttggtgcccctctccctgccagccctaccacttttcatcctgcctggtgtggggggcatctgggatggaagcttccatggctgagcagccactggttccccaggacagccacaggagccacaggccagtgacatcccagtgtgatggtcatttgggtctgggtctgagacaggcatggttgcaactctcccttttccccacctcagtcctcttctccaaagacagctggagttccagcaggaaagatctgctcaggtccaagcccaggacccacagaaggatcctgtagaacaggaagaccagactggacccaagacttccctaaccccgccacgcctggtctcaggtactccccgatgcctaagagtaacctgatccctcacctgggcatggatatccccacctcagagtagtctaatacagcttagacccttcctttgtgggggctctggggggagctgcatgagacaatcctcttagcaaagtagggatgagtgggtttcgaaacctagagagggtttcatccaactcttccaccacaccatgacacttcaagggcacctgggctaataaaggagagagggagacattgcacaaaggagggtacagagcaagtccagaggcaagcatctgttgagagcctcatggtggccaagggcatctagaaacagacaacaattctcaggagaaactggtaggaatcaggggtaggaaagtgcctaacagaaaaccgagagaccagggcagagagggctaggaacagccaatggcttcaaccgggtaggactgacctgggttggcatagagacacggaattaagccaggcagaaccctttccaagagaaccagagtgactgcagatgaggcgaccccctacccagcaagccttagaaaggtacattgtagacatggacaaaaagagaagtacaaaggatgtcaacgaccatctctgaaggaccaaacaaccacacttttgcccctctgtagactacctggtgcttggggcagtgggcaagaagagggccttgagaggatcaacagctggccacccagtggacaagaactgcacaggttcaatgacagtaggaaggtgtccagcagaagggttgattggaacagtgcctggatctcctgctacagatgttaggcataaaggcactgggtgaccctagccacctacctcacactgtcacagaagcttaagaaccaggccctcagggatgaacatacactcaaggatgaagttcagatgaccctgagccaaaacacaggcctcatggcactttgttggccttaggacagtgttttcctatcttcctaatgctgcaacatagtttctcatgtttggtgaccaccaatcataacattattttcatgacaactccatagctgtaattagctactgttatgaatcataatatatgataacacctgatatgcaggacatttggtatacaacccctgtggagacaaaacccataggttaagaatcactgccctagaactagcctcaggactgaagccatgttttctctgggaagcagatgaagcagggcaaagggaggtagcctagtgggaaagggatgctacccacctgtaggtaacacaaaggactttggaatcctctctacctgtggttgcactgcccctagcctgccaccatctccaggctgcaaggttatggatgggcaccaactaaccctcccccacctcatctgacaggtcccctctgacatgctgttttcttccttctttctagaactttccaggacatcaggctttcatttgatcccttctcccccaaagtacccaatgccacctgagtcaggcatcagctccttggggagatctgcagacctgcccttcagaggacgtaggcttagagttctgggcagcttggggcctagcctgggtgaggggtctgtcctgggtgagaggttggctgcagtgactgccttgagagccctggaggcgtcctcaggccccagccatcgagcccagggatgtccagacccaaagccagcactaggtccagcagcttgccctccagggctccactgccttcatcacctgaaccctatccctccagcccattctctcccttagtgtaaccttcccttgctgatatctcttggcctaggtggggccacagtgaagtaggtggagctggggctggaccctttagatatcccaggactctgggtcatctatatggcccaaattctgagcctgcttatcctagggttcaaaattgcgcaagcatcctgggaagatttgcaggtttccttatgtgggggcagttcctttctgttgggacaccatataccctctgtaaaagccaagcgaatcattttcaactctcaggtatgcagaaatgtgctttactttgcaagcaatggttggttcaataaattatgaagttgtcactgcctgcctggcctggctgacctacaaccgccgacacaattcctcagtgatgggagggtagcagaggaagcggaagccgtatctgctctcggctgtgttctggactgacagggccaccatggggcaactcaggtccacgcttttccggcacacctgcagaaaacactggggcctaagagccatgtgggctagcggatcaaagtgtctccggccacagcatcacacttacctggaccttgtactcctgcctacccagtgagtcctcaccaagacacagtctggagggacactctgggatcacgggcaggagctctgacgtctcagccttcacaccttcctgctgtgtaaggacttccccagagggaagaagctttcgggaacttaggagtggcaagatatcccgggtctctgtggggtgaagagttcgtgaggccctcagtccgcttgtgctggagtgcctgtgctgacgaacacctggcctggagatatgggaaagacctgaggagtatcctagtcagttccagccaaagctgggcataatgcaagatagcatgagccagggtggtagtcctgtccaaggcgacgcctagggaagaaagggacaagttttgggaagcagaatcagaagcttgcgcctaccctggcttcttgcgcctggccccagcatcctttgcccgacccttctgtggtgatgaaggtcgacactgctgttcaccagggtgaacatcaggctcagactctgagagcgggaagcagtcaatggaccagtcagtgttgtccgtgaagatctttgagcccagagtcacgcagggtgtggcttggtgctcgctgaggacctacaaggccatcaggccatgtcattaactctaaccgggtaaggccaaccggctcctcagctccttggctggggtcagcactgacctgaccctgggggttgactagcactgtcacacagcctcggctagattggaattggaaggggtcctggcctgaggccactggcagctgcttcttggtcctgctggttccttcgccccatacctagggaaaggccaggtattaagtgaagaacagagtgggctgggacaggcaatgtgggctagcaggcagcagggctcaccgtgatgtggtgctgcggggctagcagagtaccgggtgggaagcggtacatgcacacagggaagtccctcacaagctgctgcagaacaaagccacccaggtcaattgtctctgcctgtgactggttgatgacgcggatgaacttctctcggtggctgacagcagcgatcttcaagcagcagccgaatgggctggagccagaaagggatgctgagtcgggaagagggggatccatccacccagtaagccacccctcatatagtccttcccacatttcctggtgtgctcatggctgggcagccctcacttcaactggggtcttgtatatgggtggtgaaggtctgtataggactccaaaacagtcttgctacacgagggtgaatggctcttacagagatctagaaaaagaagtcctttatcgggggggagaacatgagaaagggtccagtggggtgttccctgggaggccagatcaggggtctacacaataggaaaacagccattgggttcagatcttgggtggaagcagctggaccctgggggttaaagacacgactaggactctgggcagaggtgagaggttgctgaagagtgacagggggctgcacctaaccttccgtgtatccactgaagctcctagtgtgttcctgcatctgctcagaagaagctaaatttgttccctgggatgggtggccagtcgtcttctttgctccagaatgcagagctatcgggcagctgctggtgtcagactgggtcctttctgagctactggtgtctaacaaaggcaaggcgctccactccaggatcttggtaggcttctctgtgtgcttggtggcgccctccgagtccaaggtatacgtttcggaggtcgggggctgggactgcctgggaccatgatgtgttcactggctgctttggctcctagaaccagggcccaggcccccatccccagacagcctccccaaggcactgggaaccctggtttgtgttctagaaactcaggagtcagactcagcaatggtaaattaataaggttgattatgaccttggaggtcctccccttgctctgaacccattctacatactcctcctcatagctgaggcttaggagatctgtgacttagctggagacacttaaggatacagtgagaactgtcccacatccaagtcaagccaagccctcccttcccctgacccctggagactccctgaccaatgcagttacttttgatccgaatagaaattcaagttggagaagaggttgggatatcgctgggcaatgctgttccaatctacatcttccaacgggaaaccctggcaggaaataagaggtttatggctctcccaccttgtagggccccatcggctttatcatacacacaagtggaatgcctcctgtggcaagccttgctcacctccccagaagtgggaatctcagcagactcagaaaagtcactggggtctctcagaacctctgtagtgaccacctgcaagaaggaaccacagaggagctgacagggagctggagagaggtcaccctgcccccacagggcctctttcttttgaccctaacagcactgtgtgtgtactaaatgaggactgctccttgtggaggcatctcaagggagacaggtttctcagacaggcgggccgggagccccgacaaagacacctgcctacaaaagcatgctgaccgatcaagaagtgttggggggggggtgcctgagaggtattaggtcaggagcacaaactcacctcgacgctgccggtctgagacctcagcacgcgtcccacccaagaggaacgggctagctgcagaaggcatgatttttgaaaagtctgaagctcagcctccagctgctgctttgcccagaggttctgctgcagtttctcctctaactgctgtttctcctgatgaggaatttctgccagtgagagaggcctccagtggccccacctttcagaccaaccctaggtgggtagctacagcctgccaagtcatcgccctgatccctgatcccaccccatcacctgctgagcttgttccttctgtgctttcagctccagggttagcttctggacctggttccgcaggaatttgtcttgacttttggagttcctggtaggaggggcaatcataccccttagtctaggtcaagcaagggttccgaagagtaggtaaaggaggccccacagccaccaaaccctggaggcacatattagaacaggccagtgcagagtaaaccctaacaggtctgggcaggggtctacatgctagggagtaggatgacatttccagcacagtaacttaatcaagggtatggcagagtgtcaagtcatgcaaggagtaaagttagaggcaatcaggtagaggagggctcagtggttgaggctggggtcagacagaaagtaggagccacagcagggtaggacctgggttgggctgagggtttcaccactgaccgctcagagggaacccctgccacctcttgcaggatgctggagtatcgggcattgtggccattctgaacagcccaccgaagtgcctggatctctagttctctctgttcccataagagcctcagggtacgtgggtccagggtttcaggggctaacctgcaatttcagagccctgtggtttgatcaggctggcccgttggctggcccagcccaggaggccgccccaccccgctgcctccttactgctgcttgacggagcagcccattggtgtggatgtgtagagcttagcgctctgagaataggaaggagccactctgtcgacaggtgtgccaactggagaccctaagtcactgctgtctggctgtacacctgctggagctggggatacctgcttatcttcagactcctggcaagacttaggggccatgcttgatgttgctcaggagctgggaaggaaggaaggccggaagcagaatagagtctgtcctgtgtcccaggtgtgggaacctcacaggactctctctgtgtgccacagaggcccagttagcacttgccagttctttctgaggaggcttacaggtgactactcaataggacataggactgctgctcacacaagtgtcctcatctctatgtttcaggctaggacagcaggtcactttcctgggcaacatatccccagtatatacatatattccctactgtcccctctttccctacttaaactcaggctaggtgctaaccttttgcctgaaactcctactcatgtccccctcagcccaggaactcaccaccaaactcacctgaggcctaaacccacagaaggcctagggaaggaagcattctataccgttgccatggatttctgtacctgaggggggagggtgtctgttaccagaagcatccagggagacccggcccaggaccacgagtgcattctgtaccaatatggtctggatctgtaaaccagattcctacccacccagctaagccaaggaggcccagggaactacctgtccctagccagtggtgataggctggtactggaaaacaatggtgtcctatgagtaaattcagtgtggtgtgtgtgtgtgtgtgtgtgtgtgtgtgtgtgtgtgtgagagagagagagagagagagagagagagagagaagtatgtataggtgtcttgagtatgtaaatggtcctagggaagtgagttgatttaaggggcagtcaaggatggtgataagagactggagaggctgtgctaactctagccaacaagtgaagctgtgtctgatagccttctacctaactcttggaagccttcctgtgtttatctccacacctctgggctctccccaatggtagttccactagtgaaccctgaaggaccttgcttctgcctcagatcagaagagaggcccagaaggttccttctaccttgtcagcctcatacttccatctgcttccttatggccacaagggcttgggaatctcctcccacagcattgcgatggggcagagcagacagagccccaccagggcagcagagaagccattagccccccgcccccctcccgcttcagggagaggaggactgctgtggaggacgctggatccgttgggggaggggagaggatggagcttcagacaaagatcccagggtctttgtcccagtcagcctcagggacgaccccctcccccaccagggtgcagggcccactaaactccacctccctcgggtagcagcccggaatggaacgaggtgggcgggagtgttcatggcctttcttcccggtgtcctcagccacagattccttagggagcagggctgaaaaggcctagagcgattgttgagatggggtgcacgtcagggttgcaggattccagtcaggagccctctctgtgggcggagaccagcactttgaaagtcggctgaggaagtctgagctgggagcacacctcacttgggccaatcagcccagagctaacgcagcagcagacgcgcttccgcattgattaacagaggtgagcatctggggcgactccgtccggccactacctaactcagggccccgcccacacctggttgcctccggggcgggaccgagtaacgagccaatggggcgtggtgggagaagggtcgccaatgggagtgggcatggggcgggagacacacgcctccgagctaatgggatgctgtggggcggggcgtgaagaccgggagccaatgaggccgtgaggttgggcgcgccgcggcgctgggacagcaggttgaggcggcaccgaagcgcccaagtcccgaaggccagcaagtacccaggtgagctgtgccgggttctcgagactcctgagcactgggcgcggcatcagggagccgtcttcgaccgaggagaagcgaatctgggtgaagggacgcgtggtggccgtgctgcacctgcgtctgtccgctgcagagtgggacgtctggatcccgcgctgccggggatctgccgtgaggcgggctgtgcccaccccccccagtggggcgggaccaccagaacccagagctctggctggacgggagggactgcagaggcggaccggggactggcgtggggcagagggcgctcctcaggtctggggtcggttcggagatggaggtctgtctgagttgtgactctcagcttctcccaggcccaagactgttccctccctgggggggcgtttccatgactgaggccggcgttgtatttgcatatagtcattactatgtgcctggggacggtcgcccgcgtgaaaagggtagtggcctttgagcctggtgaccgggggacaggaaaacctggacctggttaatgattcaccccgttcctggagtggagtggggtgggtggggcaagagaaggctggtgaaggaggggacgcctcaaaatgctcatgagggccaaactagttccccagccactccaggaatgtgtggcctgcgggtggggctgggcacaggagggcagggctgaaggccacagtcctgagccagttgttgtggcaagccaagagaagagggccaggctttggtagagggagacctgacctgatctcatggcctgtgccctccccacaggacagggatggtcttggagcttgtggccatggagctgaaggtctgggtggacggcatccagagggtggtctgtggggtctcagaacagaccacctgccaagaagtggtcattgcgctggcccaagctataggtgagtttcttggggacaaggaaaccaaactggtggggctgtggtctaacagcatcttcccttccatggagggtggggttgattgctctattcttcaagccagtagatagagggggggacataggctgaacccgtctctcctccacaggccagacaggtcgatttgtccttgtgcagcgtcttagggagaaggaacgacagctgctgccacaggagtgtccagtgggagcccaggccacttgtggacagtttgccaatgatgttcagtttgtcctgaggcggacagggcctagcctgtctggaaggccctcctcagacaactgtccacccccagaacgatgcccagttcgtgccagcctccccccaaagccatcggcgataccaggccgtgagccacgcaaagcactgaccttcaaccttagatgtcccaagctggtccccagcccatctattcctgagcctgcagccctggtaggacccataccagacggctttgcagacctgcaggacctagaactcaggatacagaggaacactgaggagctaggccatgaggccttctgggagcaagagctgcaacgagaacaagccagggagcgcgagggacaggcacgcctgcaagcactgagtgcagctactgctgagcatgctgcccggctggaggccctggatgcccaggcctgtgccctggaggcagagcttcgactggctgctgaggcccctggtcctccttcagccacagcgtctgctgctgagcgcctacgccaggacctagccacccaggagcggcatagtctggagatgcagggcaccttggccttggtgagccaggctctggaggctgctgagcacgctctgcaggtgagcccagatctggacccctgtcaacttcgctacctgctacacagccagtctcaactctccacctgctgcacaggcagtttggggatctgttagagaatcagaccagggagcatactgtatatggaaaagaaggttgtggcctcgtccctgaaggtcctctgtacccccaggcccaggctcaggagctggaggagctgaacagggaactccgtcagtgcaacctgcaacagttcatccagcagacaggggctgcgttgccgccgccacctccacagctggatagaaccatccccagcacacaggtcagagtaattctgggaagaggtggtggggctacccccagatctatctcggctgacctgctttccccacaggaccttctgtctccaaatagaggagaactccagggagtcccccagagccacatcctagtgtccagcctgagtcccgagggtatgtttctctccctacccccatttccaccacacacacccccatccatgggaagggcccagctctggtctcagcccattcagcctgtgtctttctcacagttccccccatgaggcagagctcctggaggtagcagttcctgcccaagtaggggtcatgaagacagatgagccagcacagctgggatgagccgcctggatagcaggagagtatgatcacaggactctttccctaaagctaagctgtcctgcggtttctgcttcagggtgggaggagtgctggcaactgttatcctagtctttcaaatctcccaagtcctctgaagaagtaataaatgggtacagttcagaacttagcaggccccaaaggcatggagagaagaaaagtatggacagtgtattcctcctgtgtatgtgcctgctatgtacctcactgtatgtgtgctgccttcctcgccccgacaacctcaataaattaccttccaaaggtgcttcagtgtgtcctgaggttgcactgcactgtctgcagttcagaacctgaggcccatgtggctactgctgggttctcaagaaagcactgtagctcccagagccctatgctgtgagtgttcctaggggtgtttatctgtaaccccctagcctggtgaggcgtgccagctcagccctggcctgggttttttatccggacccttcttccctggctttccttgtttggcctgtgtgccaccagcatcaggaactgaggatgccaggacaagccagacctgcccatcaggtttgctgagaacttgtgggggcgagtcctgaactcctaggtcaagtttgtgacttctgggttggctaggcccagggaattttccctagaaaactttgttagccccaaggtagatatggacattgaaagggtagggctgtccctctcttcttagggtgagtatgaagcctgactgttagcctccaggtttgacattggggcaaggatgcttccacagcccggctcacttctactctggctcttgagctgatactgaactcttccaaaaccttggttacccagcaggccatatactcctaggtcctggggctggagatttttgtgaggatcagaaccatcggtgacaagatgggtacaccatagattatgagtgtctttacaccgtattgatgaggacacttgggaccagctcagctttctctccagctggctcctgagctaggttcagttgttcctcatttcttctgggtcagacagaaaggggatgtgaaaagcctgcaatggaggagcaaggaagccatccatgtgagttcaagaaagctgcttagtggttagggccaccaggagctcactcctgtgaggcataagtaagaccatattttctttctttcctttcctttttctctgtgtggccctggctattctgtaactcacagtatagaccgggctggatccacctgcctctaccttcctggtgctgggttaaaggtgtgtactgccattgcccagcagaccatattcttgcctagagcaggaaacagggaaggggagaggctaggccacaaagggaggctcctgatctggtgtcaacaggccagaatgctcctgtctgcattccagcctgagcctgctgtagcctagacctgcctaacctgtggccccaggcaggcagggtcaagcaaaaggtcacacagaatggatcctagagtgcaaaagccactaggaatgaatccttggtggaaattcaggggtctgaggaacccaatgctaccccctcctgaagccctacccacactccagagacttgaatagacttcttggcactggttctaagcccattatggttcctctcccaaaactaagcacagactagtagatgcagtacccagagaccaccccacccagggagctaggcagggctaagctgtatcctcctcatttgagcctgtcacgtttcctagcaaacacacaccagtgctccctatgtcctgaaaagtgcttgttcctctggaggcccctgcccaggctaggcgtagtctgcaggatgctgttcccagtggcactgaagaatcttccaagccttccatagtggccactatgctttgagggggaaaggctgacagagctctgctcctctgtggctgtattcaagtggacagaatcccattctccaaacagttgctagaccgttttgaaccaccaagcaagcctttgaattaatgaaaagtttactttggaattttgtaacgactttggagacaacagtgtgatgctaaagcaaagaacagacaagctgcccacaaatgtctggtccctggcagggcaagacctggctgagtgatgtcaggaccttaccagttgtcagtgttggggtagccttgtctgggcaattcagccagaggtcagggccaggctttgctaggcccccacctagtcacagtggtcttgttcatttccagcagagaagtggacataagaaccctggttcagaggatctccccactaagtagctttccaacaataagagtcagcttcatagtttctcaacccaagaggctgcatgaccctccccatctgcagagcactctgagtttaataccagtgccagtctagaaagacctggactaagcctgcccctccatctccagggactggactggctctagatgtcctggccctgtagcctatagcttccctggatatccttttccacttttccatggacttgagaacacctagcaggagtgccctggggaaaaggcctgtcccaggagcccatcgagagatccatggtactgaaagtggcagaaccaggcagaagcattcagctgccaatgtcttcctggaggtggccctcaggaggtgggtcctgtaggttttggtcctgttggctgaagttcatacctgtgcctgcccagagagtctctgggcttgatgactttgacagtggctcttctggggactgcacagcctggaaccctaatacacctaagaagaaagttccctccaagagggtatctggcccaagctctgacccacaggtgcaggacagagaagcccccagcccaacgtgtctcagctgggctcctacaagcaggcctgtctgtaggtacagtcttctagtgacctgctaccaccctgtctatctgaatccaggtgcccttcctccgccccagagtggaccatttgcccgccgcccagactctggtcacagggccaggggttcgcgctgcccagggacagatcagccgctgtcacacgcacagtgggtccggagcaacgcagtgtgcggtgggcagtggctgtcctgagcctggagggactgccccggcgggtgggcaagtggaggggggtcctcctctccgcccccgccctcatctcctctaacttgggcaacagagccactcctctcttgtcccgcccaatacccatatccccctgagaaaagcagcctcgaaggtgctcccccatcctccaaccttgtaacccttctatttcacctgcgaccccggcgcagggccatagccagctcttggatcaacttcagtggcagcagtggccacactcacacccaaggcgggccccaatcgggttcagttaccccgccccatatgcaaatagtctatcttgcagccaatagccggtctagtaaggcccaccctgaagggctgcagccagtgaacacgagggggaggcatcacgccccgcccgccgccgagcaacccttcgcgggcgaggccggcgcgttcctttctgcacgtcggcttggggaggggccgccacctgctgggcggggctttcagggaggcctcgctggacagtgtctccctgtgattgggcgttggtacaacccaaggcatgccttttcctcgatcggtggtatggcccgggctctctgcctctgggcctggagttggcactgctccctggtagtgaagtgcttcattggcccagagcaatgagacagctggacaaggcaggccctttgaggcaaagcagcagcagccccgcctcccagacagatgtttaggcgggctggttattcccccactcagtcgaaggaaggactgctccccttcgggaactcataactctccaggcacacgtagtcctggcagtgacccagggatggtctggaaggccagggacaccatgccctcgggaggcacgtacgcccctgcctttcttcagacccaatagatcctcaaagatgtgtgtccatctggctgtgagaagtgggttgtctcttacttgcctggagatcctaggggtctggccctggggaatcccttatctacagtgagatttgtctttgccctgtaagcgacctactctggagggagagtcctgccgagctctgggctctcagagggcttgccccagtcttttgaaaagtaggcaaaagtgccagcgtcagttattggactcctcggaggagatccaaagcaatgggatggaggtgcagccagaagagacctccttccctacacacctccctcacccctggttgttccttggaggaatcatggggcatatagctcataaccactcaacaagatgcagcagctgctcttttgcttctgaggcagagatcatcttttctctttcctgtctacctcaaccagtcttccacaccatcctcagagataaccttgctccaggcaactccaaaggccacctttgtccacctcagataccctggtccttggctcagggtccagcctcctcagctcagcctcctgcccctcaatccctctcccctgcttctttgacctccacatatcctgaatcttataaagtctgggctggagccagccagctgccaaaaactcagcctacgcagcaaagcactaaggccctaagccaaatccatatgcagaatgttgggcattgtggccacatagggatgtagcacagagaagccaggcgctgactcggtttctacagagggtcagaaattgaaaaatcaagctggaagtcctgatggacgcttgttaaaacaacagagagattatacccctataaccttgaatagaggcaggaacaggaggatatgatgcaagtttcaggccagccttctgagagaaagacagagaaagagaaaggcttgaatcatgagaaccctgaaggaactcctaggaatgaattattgggacgtctgagaaggttcacatcttgaaggtaaggcctaggttcagaggaaagacgtcagggattagggagatatagggagaaacttagctcgttcctgcctttgctaggatgtttcccacctgcatctcagaacttcccatctgaaaagcaacccttactgccctgtgtcaccggtgggtattatggtactgtacaaacgtctgtccaaatcctattatggactataattgtgactttgcagaagtcttccaagtgccaaaattaaaagtgtatagctgtagctgaagggatcaattgagctcactcacttctctctctctctctctttggttttttgagacagggtttctctgtgtagtcctggctgtcctggaactcactttgtagaccaggctggcctcgaactcagaaatctgcctgcctttgcctcccaagtgctgggattaaaggcgctcgccaccaccgcccagctcactcacttctctttagaggacccagcactcacagagtggctgagaattataactctaattttaattctaattttaggggatacaatacactcttctggcttctgtggggatctagcacatacatggttcacagaaaaacttgaaggcaaacacaggcgcgtgcgcgcacacaaagcgagagagagagagagagagagagagagagagagagagagagagaggagagagagcatgcaaggctgagaatggatagttgaggctattatgatttaactggcaggccctaaagacagtgttggctataaatggctatagagagaccacaggcacaggaaaaaagtccatgaagaaatataatgctgccaaagccaagggaaacctggagtccccaactgagaaaggcgggaaagattcctccatacctatgtagaaagcatgaccctcttgacctggcttaaataattctgacatctggtgcccagaactatgaaaggataaattctgtccctttaagccacccaatttgtagtaaaagaatacaatggccttgcctgcagctcccttagctcctttcattcttacccatgtcaccttcattgctaagcttgcttcagcttcttttgggaatctcttgactggccggcattattcttctcctcttttatgttttgttttttgggtttctttttgtttttccccttttggttttgtgagacagaatttctctgtgtaacagctctgtcctggaactatcattgtagaccaagctagcctggaaactcacagagatctgcctgcctctgcctcctgggtactgggattaaaggcatgagccaccaccatctggcactgtttggcattctttttttttttttaatttttttttttaagatttatttatttattatatgtgagtacattgtagctgtcttcagacacaccagaagagggagtcagatcttgttacggatggttgtgagccaccatgtggttgctggaatttgaactctggaccttcggaagagcagtcgggtgctcttacccactgagccatctctccagccccgtttggcattcttattgctaggtatcaggtagggcagaagacaatgtctaggctcagtgtggacccagctctgtattactcactgttcagataatggggaaggagctaaaccctccggaagaggctggacagaataaagggagtgcatagcttagttacacccttctatacatgccaagaacacgtatgtcatttctatatctgtactactgctagacatgattggttgatacttgcattacttgcactttacaggtagaggcagaaggattaggagttcaaggctatccttagctatatagcatgtttaaggcctgcttggactacaagaggccctatgtcaaaacaacaacaacaacaaaaggtactacctatgttggttttggcctggtttggcaatgggcagcttcctgccagcacctttcctcccacacttgataagcatgggttgatgtggctgtataggttgtgtactgctcaaagatgctgaggaagagtttttcgtgtgtcgctgtggacctgtttgtttattatacaagtttttcctttttcggtagcttcctcccacattaaaggcagctacagaggaaggtaggtagaaggggccggctttcgtctatgggggcttcaggtttgttaggagctgctagtctttctccttcccaagggattcagtgggtgttgacaggtattcccctatctgatgctcgtcaccaggtaggcactgtttgtgcagatgaaccaatgtatgtagagatacaagctgcaaggggagaatcggtatttgcttcagagtgagggtgatcttccaggcccccccccttatcatgctgaaccccaaataaagctttctccctgtattcactagaccagtattcacagtggcccctgcagcaagcatgaccaacatccatctctatcttacaacaaaggatgctgtggtggctcttcctggttgtcaacttgactctatttggaatgaactacaatccagaattggaaggctcaccagtgacccttatctggaggctgggagacagaagtttctgatctggatcttggtatggagatcttgaggcatagtggctatggattccagaagattaaatatccggattcaaggtcatctgggattaaaggtgtggtggaacacacctttaatctggcctataccttctgctggagagaccatataaggacattggaagaagggagtctcgctcttgctcctttgcctgcttgccatgtgggactgagtaactgctagatccttggacttccgttcacagctgctactgaaccattgttgggaattgggctgcactgtaagtcatcaataaattcctttactatatagagactatccctaaattctgtgactctagagagagatccctgactaatatagatactaagtcacaaagaggatggggagctaacctcaagctacacaagtgatggtctaaagtacctgagtctagatcctcctccatctgcatgcaattgaatggttcacagaaaagggaggacaggacgtgttccaagggaactgtttctgacaccgtccttttttctttacttccaagcagtaacaatatttttaaagttattagttctgtgtttgtatgtgggcatatacacaagagcaggtgccctcagaggccagaggcattgaatctcttggagctggagttgaagacggttgagagccaccatgcgggtgctggggattgaactctggttctctggaagagtagcaaccacctctctaaacccaccattaggaatattgataattttccttttttttaaaaaaagacttattgtgtatacctaattctgtctgcatgtatgtctacaggccagaagagggcgccatatctcattatagatggttgtgagtcaacttgtggttgctgggaatcgaactcaggacctctggaagagcagccaatgctcttaacctctgaaccatctttcagccacaatatttctcctttttaaactcctttaaatttcctcttcttagctaattctacttatcgttctcttcccagcaaatcagcgaatttactgcatagttaccatgctggcctttcctgttcagtcttctgagtttctctatacttcctccaagactgatactctcagagtctcagatgggccttactcccagccccatcgtttttgagttaagagtctcatgtagtctagactgtttttgaactccctgtgtatgcaaggatgaccttctatataatcttgcctatgcttccatatctaatttattttgtgccagggatgaacccatggctctgggcatgccagtcaagcacccctccatcttaaccacccccctgctcccaggtcctttctttcctttgagacaaagagggtctctttgtagctctggctgttctggaacttgctatgtgctccaggctagccttgaactcacactggtccgcctgtctcttctgagagtaaaggttatgtcaccctgtccagccccagatcccttcttgatgtatgtgtttgcttctccttttcttgttttcttcagtaccctacccttgagtttctttgtagaatctggactttttagcactgaaagtcccaggttccaaagctggtccccactaccaccacattttatctccaaggcagccttttgtcctctgctctctggggataaccctagctttccctcttctaagtagactcctatctcctcatcttcatattcttccttccctctcctccctgcccctctcatccagtttctcagtaaatctacagtctgtcttctcctcctttctttttcttttcttttcttttctttttttttttttctttctttctttctttctttctttctttctttctttctttccttttttttttttgttgttgttcttgttgttttcgagacagggtttctctgtatagccctggctgtcctggaactcactctgaagaccaggctggccttgaactcagaaacccgcctgcctgcctctgcatcccaagtgctgggattaaaagcgtgcaccaccactgcccggctacagtctgtcttctattcctatcaaaagccatcccttctgagccacagtggtccctggaccacaaaatgggcagttgagtccagtgagccatgattgccacctgtttagtacctcagtgtcctctgatcccctcagcctctaggtcagtctcagttttgtgggtctgaattttccctgagtcctctcatggttcttcccctaatcctattatgctccatactttgacccctctcaccaggcctttatgcgtactaggcaagaaagtgtcctactgccaggcggtaacctctagttctgttctttctattaattatctgtgccatacaattaagttcttcacggtgttcacaagttactgtgcctctcctcgccgggctgaaggggacggaggagctcgtatatacaggatccatcatgattaactgcatactggaagggaacctgaagacccaggggacatcctgaagcttttctctagcgctcctccagccgcgggctgcagttaagtccagccaccaggaggaggcgctcacgggagggcgggacggttgtgggcggagacgtggtcccggggccgctcccattcatcgcggcggatggggagtcggactgtaccaactgcatggaggtgagacccacagcctggtttagtgcactggtgagagctcggacagcacacgctcagcaaaacactgctctcctctgacagtacttgtgatgggctagtcggtgttctgagaggaaggggacgcgctaacgtctcgtcatcctccgccgcgagttcctccccgttttggccttagtagtttccaccaacgggcagggcagaaagttccggaagagtatgggtgcacttccgggtcggggagcgcgcggcgacggcggcggcggctgaccggcctacttgcggtcgtgttcggacagaggcgggatcgtctaggagcgtccgggaggcgcgaggttcccgggtacgtgcggtagccgctctggcccggtgtccctgtcgcgtccggccgcgcgggccacctatggtggccgtacgctttgtctgtggccttccgggccggctaggcctacgtcgctctggccgcgggtcggtccggaggacgagagggtggctgaggcctcgagctgagccccggaacgtccggctgcgaccgggaggcccatgggcgtggtgccggccacctgtctggtcatgcgggaacctggactggtgcataagaaaggtgtgacccctagctacctggttttctgtcctgatggccctcgccctggccagcaccatctgaacttgcccaaattgtgcttgatgtcgcgattatcgttttccttagttcgaggagccctcccagcattctcgagtaggcaccactgtcggagctttacagccatagttcggagaggtaaagtcacttgtcagtgttacatcgctgcagagtggcagagccaacattgctttcaaacctgtcttcctgtcttgtgtttgaaccccgggttgctcccatcgtgtcttgaaaggagtactctgcaacagaaaacagtaacgtgtctggcgactgtcatcttggccagtggttggaagcacagttggagtttgagattgacttgcagctcggcattcctcctttctccccatagaccactctatactcattcctctgggaagaatgctgagtgaaaagggcaacctgtggcgtcactcagcactgagagaaagccaagacttgtgtgagtgaggttcacagagttccttatagctcctcttttctgaaaactgggaccatgaccgaggtccccgtcatgaatgggccaaagctctgtgtctatctcagtctgcattttctaatatcagagacggtgtgtttcagcaggagtctgtggcaaattctctgagcaccaggtagacgtaagatagtttatcagaactcttctccctttactgttcccaggcaggagcaacatgtgacaattgacattccttaagttatgccctctgtgtttagagaccatcagctcttctcctggcctttgacctcttggagaagggtttcgcccttccctgtggctttgagtggatagcctgtgtgttcttgaggccgatggacctctaggatctggggcccctgatcttgagccctatttttcagctttcttatgctgttttgttttgttttgtttttctctgactgtggacattaggtttggtgggaagcatagggtaccacaggataggctagtgagtttttgaatgaattttctgtgaaaggggcttcctctggaagtaactgggaaagttaggtggcacagaggagtaaagaccacatatatgaataggttcttatttggggaactagagcttggtacagaaggaaggtcatatctagtgacatttatgatccttctttctctcttttgttttttgttttgtttgtttgtttctgagacagggtttctcagtgtctccctggctgtcctggaactcattctgtagacaaggctggtcccaaacttagaatccgcctgtctctgcctcacaagtgctgggattaaaggtgtgccacaactccctggctctctctcttttgtttttgaggcagggtttctctgtgtaggcctggctatcctggaacttgctctgtagaccagactggcctcaaagtcagaagagtgaagacaggaagtcttttaaacattgttcttacaggcttgcaaaggaggactagcaggtgttccagctgacaaagtcaggagagggacagcccagcatcttctgcctttcagcctgggccacaggaatgccatagtccccaggaacttcatctgaggtttataatctgatggtggccagctgagcagaggccagtgggccagcattggccaagagtgacatgcccacttagtgacaggcaaatgggcgactcaccactggagtcctcgtgatgaccggctctcaggtgaaaagtgctgctctgtttcagcgcatatgtctgtctggttcatttctgtattaggactcttcaggaatgcttgggtgagagcattgctagtcctcaggcacgaagaccctgctttgcatttggttctggaaactagtcactgtctcttatgaagatgtattttatgttttatatttgcacatggctctatgactagggtactgtgtgttgtgtctcacagctcagattctacatgtgtgacagtgcttaggccaccagggaggtccctattgggaatggcaccttttagagtgggctctgtagccagggaaggttggagttatttggttctggtctctttcagaggtgaactccaatgtgcagccatggatgacgacaacttggatgagcttgtggcgcacagccctgggccagatggacccccacgggttggctcctcagaactggccagtgatgctggtaagcaccccactgccacaccccaatgctggcagggtgtctgcaaaggaatagcacctggtgctttctccaggttactaagctcctcttgggagcttaaatgtcagctttcacttttaaccttaaaaaaaattgttatagaagtatagtacattcagtttttttttttttttttttttttttggtttttcgagacagggtttctctgtatagccctggctgtcctggaactcactctgtagaccaggctggcctcgaactcagaaatccgcctgcctctgcctcccgagtgctgggattaaaggcgtgcgccaccacgcccggcacattcagtctttttgtttgctttttttgttttgtcttgtttttaagatggtgtggttcagactgtccttgaacccttgactcgtgtgatcagcccagctcagcctcccaaagtgcgggtagctaagactacaatcacatgtcattgtgttccatctttttgtgaggagggaggattagggatagaacctaaagctttgtgcatgcttagtaagactgctgtggggctctagtttttggaacagggtcttgctgtgtagaataggatggcttctagctgcggtcctcctgactaaacctccagacaggggaatgcatggttttcattgatttgttttagttttgcctgggctcctgtggcccagaggcctgctgaggacggtcgtgagcttctgaccccgtgcctctgcctctcaaaccaacgctgcggttacagatgtgcaccgctgtgctgggcgctgggtggtgctgggtggtgcacccagggcttgatcatactaggcgtgcacactactagctgagctgtatttcaagccaccttgtcttatttttaatgctagcaacataaatacagagtaagatgacacatggctccccattttatatctctctagccagcccctaacccctcctctccctcccgaccccaaccagggtagcctggtgttgtagacctgtatattcccagagcagctttggctccctgctttgacactgccctttggggcctgtgcttttaccttgtgatctagaagaaagcagcaatggccaaagtggagactctgaagatgatacaggcagtgagcaggatgatgacacagatggggaggaaacagaggggctgtctgaagaggaagacccagaggatagatctggtaagattatagccatttgagccagttgccttgaatctcttagggtgttacctgtcataggaacaacaattgacttctgctggagtttttaatttttaaagttaagtttagtgatagaattctgtgggtatctcttctgggaaaatgtctaaggacattgtgcaacataagccatgggagaatgtagggagactggagctctgagaggatgagcacggaggtcttggtagcctccattcattttatgagggccaactgctagtatcatctaggtgcaaaacagcttagcaggcacttaggggcatgtggcctggacctcttttaggacaaagggcattagtcctgtcttgtagctctttctttgcttattcaaaaagctcattctgtggtattatttcaaaaggcctggcttctgggcactagagaaagtttataacttgaaactcatgcagagaataatgcttgaatgacacacttatactctggaaaaccttcatggctgccctggcctatgggcagtctgtgaaggctctatgtggttggcatggccccacccactatggctacctttctcacctgtcttagggtttctgttgatgtgatataacatgaccacaagcaacttggggaggaaagagtttatttcatcttcctactcatggtccatcatctaaggtagaaaggtcaggagctcaaggcaggaagtgatgcaaaggacatggaggagggacatggaggagtgttgctactttcttaacagcgcccgggacaaccatcccagggtggcactgtcagcagtgagctgggcccttccacgacatcagtaagaaaatgttttacaggcttagccacgaaactgtctggtgggagcattttctcagttgaggttctccaaatgaatctagcttgtgttaaattgacctaaaattagccagtatacaaacacagggctcagttggactgagttcgggtttccttctggtggcaggctcaatgcacctactttttcctaaatttcattatagcctttggctgtcaatgagagtgttctagagaggtaacccttgtaatcgggacagtactcatcatacaggagtagaactgactgtgagttatgtaaccttgtattgataacaattgtccagctttccaaagctagttagccttgaattcactccatagtcaaacctcacatttctggcaatctaggctggagaggtggctcagagtttgagaacactgctctttcagaggtcctgagttcagttcccacaaccacatggtggctcataaccatctataatgagatctagtgctctcttctggcttgtaggcatacacatacaggcaaaatgctgtatacaaaataaataaatatatctttaagaaaaacattcctggcaatctttctgcctcagcctcccaaactactagaattaaaacatgttaccactatgcctggccaggcttttttcttttcattctgagtgtggactagagaatgagtctatcctggattaatggtacagacatggctcttttgcctgtttccggcattgaggtgggcttgtcctattctcaccagacttgaacagttgctgatgctggggccggggatgtcaggcactattgggtagctctggcatcccttcctgaagtttggagaattgcaatggccagaaactgattgtgaaccagattgaaggtgagacccattcagccaggattcttggtatccagagcttgctatctaatggtacagaccagctgaggtgcagcaatcagagatagatgctcagagtgtatatgtgacattggggttagggatagaatttaacagctgggaggaagtaaggagcttttagagagacacatctaagccacagcctaatgaacaggagctagtcatatacttgtgggagctgggctggaagcagagaattagtgaggaagagatgatgtagaaattcaaaacctaaggtgggctttgtgaaggactgagataagcccaatcctgcacctagtgcaagtgtcttttcctttccttccttttcttttccctttttttttaaaagatttatttattgggctggagatggctcagcagttaagagctcttccagaggtcctgagttcaattcccagcaaccacatggtggctcacaaccatctgtaatggggtccgatgccccttaaggtgtgtttgaagagaacaacagtgcatttacatacgttaaataaataaataaataaataaataaatagggcgggggtggaggaagatgaacaaggcagtttgtagaagacgttatttgaggcttcagtttagaggagtctgtgaccatcaaggtagggagcagtgcagtaggcaggcctgtcattggagcagtagctaagagcacacatctgtaaatataactatgaggcagagatactgggtaatggtcttttgaaacttcaaaattctttcccaatgacatacatcttccagtgaggctacacgacctaatccttcccaaacaattttaccaactggggaccaatattcaaatacaagagccgtactttcacccacagcatactttaagggcattatttggcaagccaattgagagtccagtgagggtcctgagctatttgtactcattttttctctaccttcaagtcaattggggctgttctcagcatccagtgctctgctctgtgtgcactatggagatcaggcaaaacaaggtggccaggtccctaccttcagattgcaggggagaagcaggtcctctggcttcgctttgattctgctgccgtgagcctttactcacaggggaagctaaagttattcgtcattccgctatggatgtcatgatttttcaaaatgttatgagtatctctttcatcaatttttctctgtggtatagcaaatgaccacaactcaggagcttggaatagtatgtttattgtttgtgtgtttttatggatcaactgggtctctttattttttgttgttgttttgctttgtttcttgtttttttgagacaggatttctctgtgtagccctgaactccgtttgtagaccaaactttctttgaactcagagaagtaagcttgcttcttcctctcgagtgctgggatcaaagacatgtgctgctaccacccagcttcagctgagtaggtctcttattcaggcatcaccaggtggccttacagtgttagccaggctatgttccccttctgagcttcaatcttcttccaagccctctctgtctgctggcagattcctcatggtctgaaagaatgaagctccattttctttttctttttttttttttaagattttatttatttattatatgtaagtacactgtagctgttttcagacactccagaagacggagtcagatctcgttacggatggttgtgagccaccatgtgcttgctgggatttgaactccggacctttggaagagcggtcgggtgctcttacccactgagccatctcaccagcccaaagctccattttctagccggttgttaacagaccattcctagctactgtgttatgccctcctttgggagtgcatgttagctgtttgtgtccttctatgccagcaagagcagcctctgctttggaagtgctcacctatgtagaggcagaaggatcgaggagttcagggtcatcttcatccacatagcccgcttagacaacatgagaccttgtgtcaaaagaaatgaacaataggagctggcaagcttgctaagtaaatgaggatgtttgccaccaagcctggcagcttgagctcaattcctaaaattcacatggtaagagagaaacaatttccataacttatcctcgttctgcccaataaataacaaatgcttttttgtttgtttctttgtttgtttggttttttaaaatctttttaaaagcgctcatgtggtaggattgatcagcgagggtaagttccactctgtgggttggtagcaggactctggagaagggcagcctcgcacctttgttagtcctacttacaaagaaccaaaatctaagccccagtgaggacctgcttttctgttttttcttcttttcttttcttttcttttcttttcttttcttttcttttcttttcctttctttctttcttttcttttctttttttttttttttttgagacagggtttctctgtgtatccctggctatcctggaactcactctgtagaccaggctggcctcgaggatctgcttttctgatccctgtgatatatgtttagtagttcataggggtttgtttgcgaactgcagtgtttgctaaatgcatcttcatattttcctcctgacccggcctctgtttcataatgccgagatcgactagctcttttatagtcactaatccagttaggaatcttctgtctgtcttccacaagggaggaagagatgcccaagaaggaggtctgatctaagagcagattatttgttgtcactaggttgaaagagttgtgcagctatgcaagggttgttgtcctagggggcattcttagaggcgtagtcattattttgttgagtgtttcctctgtgcctctagagctgaaaactgaacctagggctttgtacttgctaagcaagtgttctatcatggagctaaatccccaacccttggtggtttagtcattagcaccatcttctctgaagcctgtgatagctcacacctaacttcttggatggtctttttctcagaggctcaggtatgaggagctagtgtaatcacttagccaaatatctctgtctccgtagctcagggcagctctggacagagagccttcaggtaaggagtggggactgtgtgagggagacttggctcaggaggagctgggttctggctgaggctctgcttaagggtagtccctgaacatgcacttgtttctgtattcactaacaatataatatttccatttatccaaggttctgaagactcagaagatggagtagaaatggcaacggcagcaatagagactcaagggaagcttgaagctagcagtgtacccaattctgatgatgatgcagagagctgccccatttgcctcaatgcatttagagaccaggctgtgggcaccccagagacctgtgcccattatttctgcctggattgcatcatcgaatggtccagggtgagttggcttttcagtgggctactgctaccccttatgactaggctgccttctctgcagcaaaactgaacacagggctgagtgctgcctgggttctcagcattgtggggaaggaatgcttactgtgggggctgttactgggtgagaaaggatgactctggcttttctgagggtcaggacacaaactcttcggcaacctcacatagtaagtgtaaggcagcctctgtaggtattggaatggtgcaagtgtgcttactcagttctgatggcaagtcatgaagagacaagcttttatcacgctgcttaccttgcagtgaactttaaggagacttgcctgggccttcacccactggcaaagacttttatatgtgtacaggtatgtggtgtgtgcctgtctttacacgtagaggctaaaggatgtcaggtatcctgctctgtcgctttctgcgttattcctttgagtcaggatcttttactgaagctgcagcataataggcagctagtaaacccaagacattctctcattcttcatggcattagcattgagagatgaaggtataatcttgcccaggtttttatgtggatgttgagatatgagtttgggtccttgtgtttgcataacaaattttcttatctgttgagccatccccatccttaaaaaaaaaaaaaaaaaaagtcaaaataagagttgttattgcctatgcttctatctgtccccaatgatactggcagtgtggtgaaaaatttcagcaaggttataggggttatgcctctgatattcccttccttctcccccaagtagcttagacgtgtctctgtagtttactctaagtggtatggagatggcaaatgcctttcctgtgtccacaattctgccaagttagcttattgtggtgttgtgtcaaacttctttgttcttttgtgagtctggcggattagattcagattaagttgtttcattctttaagttgaacagcaagaggttggatgtggtagcacacacctttatcccagcactcgggaggcagaggcaggtggatttctgagttcgaggccagactggtctacagagtgagttccagcacagccagggctacacagagaaaccctgtctcagaaaacaagacaaaacaacaaaacaaaaaagaggtgggatgtgatgacacatgcctgtaatctcagcatttagaagggaaagactggtgaatctgagttgaagaccagcctggtctatataacaagttccaggccagccagggctacataattagagcctatctcagttaattagttgaagagcaagacattctgtttactgtatatatgatgtttattggtaagggaaagcatttgaaaatgagcttattagtaaaaaaatcttacaagtgatcagatgttgaatttcatgaggtagttagatactgggttaataaaggtgaaaaatctagacttaaaaatgactcagggagatggacggtggtaatacacacctttagtcccagtacttgggagtcagaagcaggcagatatctgagtttgagccagttccaggatagccagaactatacagagaaacctcttcagaaaaccaaggatgggggctggaataaatctttaaaaaaaaaacaaagatggttagatgtataaatgaataacaatcaatcaggggcactggagagatagctcagcagttaagagcactggctgatctttcagagaacctgagttcagttcccagtacccacatggctgctcacagctgtctataactccagctccagggatctgacactgtcacacagatatatatgtaggtaaaacaccagtgtacataaaattaaagtaaatcataaaaatttaaaaaatcaaatcagggtcatggggatggctcagcagtaaaggctcttgtatcaagcttgacaacctaagtgtgttctctagcagccacatgaaaggagagctctaccttccacaagctgtcctctgctcttagctctcagagcagtcacttgggctggtcagcaggggaagcacttcaaagccaagcttgagtacctcgtggtggtgtgcagagagaagagagtcaaatacattgttttctgctctctttacatgggctatggcacacatatccttccccgccagtctgggctacactgacaccctgtctcaaacactttcaccaaagagagagggagggagagagaggaaaattaatattgaatcagacaaacaagggaacatatagtgccttgattctcacataactgtagtggcagaacataaaagaggtggcagacctgggtggccctcagtttatacatttatcagaatttagtggagtacacagctaaagatggtatgttttattgtatacagtatatttcaggaaaggcaacttgagctgaacagacaaggaaaaaaatctttgtagcatgcatctgattagcctacacactgaaaagaaatgctgaaaagatactagagatgctcagggtctactgagcagttcacagaggtctaagagaagatctgggtcagcaacaaacaggctgagatgccgtctacccagtctttcccttccctcctctccttttccttcttagtaacacctgtatgggagcatgcatccagcatgttgaccttgctccctcagtagcatggtgacttcaagttttgttcacccagttctagcatcttagcataggcccttagccaagaccaaggctatcgatacagatttctgtgtaaaagaaatcattatttttggttttttcaggacagggtttctctgtgtagccctggctgtcctggaactctctctgtagacttgactggcctcaaactcaaagagatccacttgcctctgcctcttgctacatgcctttcaagggctttgtgcattaccactgcctggctaataaaaataactttttagtttgttttttttcagatatactctatagatcaggccagcctcaaattcacaatcctcctgtctcagcctcccaaatgctgggataatgggcaggtgctaccacattcagtttaagattgttgattgttaagtaaattctttattttgaagacagtcgtgataagtgataagtgattgtaataagtaattgatgagtaatgaaggggattatgccggattctgatccaatctttatttcttacagaatgccaactcctgtcctgttgatcgaacagtatttaaatgtatttgtattcgtgcccagtttaatggtaaaatcttaaagaaggtaagtgtaggtgctgtctatccctgcttgtattcttataggaaggatcatgatgctaaatggtgactcgcttttctcctaagtggttgtcagttcaattaggcataaaaggagtgactcaggcatcctttttcgccttgagcaaagcctagggctaagactggtgttttctgggacataggtaccgagtcatggagatgtttctgtccctcaccccttctgactacagagctcctctccagccagcctccttatgaactgcagtcttggcgtgtgggaggtgcagtggggggacaaagggccatgtgaactgaagtttggaaagtactgttggggctgcaaggaaaggtggttttgcttattatttattgtcccctccttttctcccttccctaaacccctttctctttctatcttttccttcttttttcactcccttctttgttttctctgtctttcctatctgtccctcccttccacttcctttctttctttttttcttcttttcaatggattaaattccaggccttgtgcatgccaggcaagctacacaaccaagaactacaaattgtttgagagagggtctcattatatagaccaggctggccttgaactcacagagatagatccagctgcctctgcttccagaatgcaggaattaaagtgcgactgctacccacatagtgctacccttgtgttttttgagacagatttttcctgtgcataaaaagatcggccttgctgcgattgtgtacacctttaatctcagtactggtgggagatagaggtgggcttatctctctgagtttgagtataaccaagaaaacatagtgagatcttaaaaacagcagcctgattaaagggatggttcacaccatcaaccccatcgtttgggaggcagagacataggcaaatcaagtccagcccagtctacagagttccaggataggctacacacagagaaactctatcttaaaaaactgaaaacaaaacaaaacaattaattaaataaatagataaataaataagtaacaccaataaaacaacaaaagagatttcaggtctccatctgctgacccttttgctggtgactgagcctaggaccagcggctgggcaagcactctgccccctgagctccatagcaggagtgttgttgagctttttctgtagagctcttgtgcttctgctttaaagttatcatgtgctctccccacccatgtctgcaattcacagcactggtgaatctgtaccacgaagtgttcctgcatcacaggctcatgtttgttgcttatttgtttggttttcttagagacagggtctctgggtagccctggctgttctgaactgattatagacctggctggcttcaaactcacagagatccacctgtctgtcccccaagtgctgtgattaaaagcctgcaccacctctcctggcccctggcacagttcttgcttttacttttcttctagttacctgtcattcagtgaagataacatacaggtcaccatatgccttagggttcctgttgctgaaatgaaacactatgaccagaaacaagttggggagcaaaaggtttctttggcttacacttagatgctcttcattactgaaggaagtcaggacaggaactgaaacagggtaggaacctggaggcaggggatgatggcaggcacagctttgcggctgtggagggatgcttgcccttacggcttgctcagcctgcttgcctgcctgccttcctttgttttgttttgttttgtttgtttgtttgtttttgttttgttttttagagataggttttctcagtcctggctgtctgggaactcagatttgtagatcaggctggcttcaaactcgcagagatctgcctgcctctgcctccagagtactgggactaaacacatgtgctaccatgcccagccttcagtctgcttatagaatccaagaccaccacagagagatgataccacccacaaagggtggtataccatcccccattaatctctttaagaaagtgccttacagttgggtctttttttttttttttttttttttttttttttgagacagggtttctctgtatagccttggctgtcctggaactcactttatagaccaggctggcctcgaactcagaaatccgactgcctctgcctcccgagtgctggtattaaaggcgtgcgccaccatacccggcttacagagttggatcttagggtgccattttctcagtctttcagatgactctagcttgtgtcaagttgacataagactagtcagcatatcatatatttgattattcaggttgtgggtccatagagcctatcttaggggttctgtttgttgtgataacatcataaccaaaagtaacttggagcaaaaagagtttattttgcttacacttttctaatcacagttcagcatcaaaggaagtcagggcagtgacctgaagatatgagctgatgcagaagtcagaggagtgctgcttattggcttgctccctgtggctttctcagcctgcttatagcatcacaggaccatcagcccaaaggtgacactatccacagtaagctggctagaacatgccaccttgcttacccataggccagtctgataggggtattttctcaactgagatttcctcttctaaaatgacgctaacttatgtcccagttgacattttagccagcacacatcccaagtagatcttaggccagtgggtttactttagattagatacatgtcctatgaattgaccactcagatgttgagggtatgttcactgaccaatatttctgtcttcagattccagtagaaaacactaaagcttgtgaggctgaggaggaagacccgactttttgtgaggtgtgtggcaggagtgatcgtgaggaccggctcctactgtgtgacggctgcgatgctgggtaagggtactggtgccttgcaggctgttaagtttgtcatgctcaggactgcattgtgaagtggggcccagtgggtcatagacagtgacactgatacctctcctggctcctgtgtctatacttcctggtgctgctcaaaggccgtcagtatatcaaggtcaaagaaaaaaggcaggagagtggactcaccttaggagagagggcaggccagctgaggggttgcttttgggacagcatcatcttggctgcctggatctttttatcattattgttattattgtttctatgggtgtggcctatatgtggatatgtacatgtgaatagaggtgtttgtggaagccagagactttggatcaccctggagctggaattacagatgggtatatgcttcctgaagtggaagcctcgtgccctgcaagagcgatgtggttttaactgtgaaccatctctagctccctcttttgccttctgatgtacttgaaatcactttatgcttgtgaccctgtcttctgggacactgcttgtgttctttgctcactgtttgttctctaagatggaactggcctccctagcctcttgctaggtttttggctattgattagaaagttttttctgctataaaattgtggccagttacagaaatattcttctccaggtggagaggctggtagatctggaatgtttcctagggcagaaaacaacagtttcaaggtgtggacaagaggctttgtactgttcgtgctggaagggagaagcagttttctgcatttgccctcgctcgcttgctcccctgtggctgtcgctggggttcttctgggttgccagttgtgccagctccactggctggaatttggtgtacagtttgtacccaggagctgactttcatcatttcaaggcacaagggtctcctgggccttcatgcctgtagaaattcagttggtacaatgactaccagcttgtcttgcagttttgttttgttttaatcaagaattaaacttataaattcatactgatttatgtatttcacttaacagatgcaacagtgtaagcattaaaatcatgatagatctaagatattaaaattaactcatattagtggttcttgtacttctaagcacctaaatactgttgacttttacatttttctatatcttcatggttgtctttcaactctcaagtctaaaacttctcattcattttgaaatggaatcagaaggctttctatattccaggacagccagggctacacagagaaaccctgcctcgaagaaaaaaaaaaaagaaggctttgtatagatggttgggggaggggggcagcacatgttgcacacattgatattttgtgaaataagcacaggttgtctttgagttctaaggagttacgactgaacattaaaggtccgtgttcagagagaagatggggtttacttgagtctctttatggcttttcaagatttgttctggtgtatgatgttacatggaccacattgcatgtgacgttccagtaagggccacccacctgactgtagaggattttcagttccggccactgacataatagtttataaccacccaaagctcccaggcactcgtgtagcacacactcatgtacacattcatatactttgttttgtgggatttttttgttgtggtggattttttgttttgttttgtgggtttttttggttttgttttattttttatttttgtttgtttttgtttttttgtttgtttgtttttttcgagacatggtttctctgtgtagccctggctgtcctggaactcactttgtagatcaggctgacctcgaactcagaaatccgcctgcctctgcctcctgagtgctgggattaaaggcgtgtgccaccaccgcccgacttatttttggtttttgagacagggttttatgtagccttggttgccctggaactagctctgtagaccagtctggccttaaactaacagagttctacctgccttccaagttctggaattaaaggtgcatgcttccctggctccaggctcataatacaagagaaaggtagaaaaggtcagcacagccagcacaaagtttattcctgcgaagcttaagacccgagacagagcacagtagctttacacctttcatcccaacactatgagttcaacgccagtctatcctacatagtgagttccaggctagccaaggtacttagtgagaccctgactcaaaacaaaacaaaggatatggagagagaaaggggctggtgagatggctcagtgggtaagagcacctgactgctcttcggaaggtccggagttcaaatcccagcaaccacatggtggctcacaaccacccgtaatgagatctgactccgtcttctggagtgtctgaagacagctacagtgtacttacatataataaataataaataaaaaaaaattttaaaaaagagagagagagaaaggcctagaataagctagggactgggtgcagggcttcttggggcgccctcttcaggaacctctcatctctttgacactctccatgccctgtccttggtggtcttgaaggagacttatggcatggtatgattgaagcatggccattggactgaaatgtgactggacaggataataagatattctctgccagcatgggacaggacttttgctaggcaagtgttctttccccagccccttagaacgctctcggtgttctaagggttacttagtcatctactgtcagatacagtgggtcaaaaaggagattagaatttctgtggcccaccttgggagtggggattagaggcaggactgtgtttagcctgaggaccccataacattggaagtgagaagccgttggcaggatacattgcaaactagactatttaaaatagtctttgcatgtggtttcttgtgagacttgaagtccaaggctaagactggcactgaactgttgttcccataggtaccacatggaatgtttggacccgcctctccaggaggtgcctgtggatgaatggttctgcccagagtgtacggtccctggtgtggatcccactcatggtaatgtgctgtcctctctttcctgcagagcacttggggttttcctatcgtcagttttagagaaggaccttgtagaaaatctagacttgttatgtgggaagaactttcatcagggagagggctttctttgaattccttggtaggagctggaggacttaacctttggaggccacgaaaggttgtcagtttagggctttcagttcttaaggctaactgggaaaagcttgtgatatgtgatagtgtacatgacccagcagcccacggctctcttccaagatgcagctcctgtgagtgatgaggaggtctccttgctactggctgatgtagtacctactacaagcaggcttcggcctcgagtaggcaggacccgggccatcgctaggacacggcagagtgagagagtgagggcaactgtgaaccggaaccggatctcctctgccagaagggtccaggtaagtggctggctctcaacagggtggtctctgggcttgggagctgaattgaagagataccactggcagtaaagggccctagcatggtcatatggcaggcctagcatgcatgtagttaatctgccagagcgtaggtgagtctattgaaggtgctgtgtttcacctatgtgccagcaggaccaatgggactgccttctctaacacttggatggaggggataatgatttgggaaatatgctctagtgtgaaaaaggccacttactggctcttcaccccttccaggctcaagagattatcttcctcatgcctggcttctggcactcagatgaccacggcccctgttctgggtactgagggagcttaaaagttctttctgtgaagtcatattcccatggtcaatatagtgacatcatggttcaagttccaaataggttgatggactgggaactatcttctgtcgtatgcccgtctctataacctccagttttgcacttgcgtctcagctcatgcttgccatctctctttgactttgtgccttggatgcaggatagtgttgggggctgctatttctcactcactcctttgttttctatctgctggctcattccctattccctgctaggccctcatcatcacatgcctgcctcacctggggatctgctcctggctcccacctgcccacttccttcctgcttggacctcctttgctccttgatagcagctgagccctctagtccatccttgccctgatcttcccttctagaactctgcaaggaacaactctgcttgtgatcatgctgtccactgttggttgggaggtagtttcagtcttaaactagtctggcttctctggtcagtttgcaccatattcagggatctgaatgggagtctgcactgacgggatccactcacatggcccagctcagtgttccatccgtgggaagggtggtcacccactgagtggtgctgtcccttgtatgcagcatgtgccaaggtacctcatgtcttctctgctggatgaaactattgaggctgtcgccactgggctgagcactgctgtataccagcgtcccttgacacctcgtgtccctgcaaaacggaaaaggaaggcaggtaagctgacataatgggcttgcctcccaccatcagctctattctggagtccagatatgtggtcatttctgattattcctgcaactttctcagccagaagaatagtacatctttcacatttgtgggttctatactcaagctcatgtaaacctagttagagactactagggagaaagaagcacatctggactgtttggtacagatgtgttgtcatgccctgtgctgttgatatgcctgctgcatttcctaagtgtataaatacctggggctagtgtaaactgtagcaaatactgttgacacattatagaagggacctagaaccctgagaccacctctgcatcctgaacttatcttagtgacccaaccttctccttcagattagtgtttgatgtgcctagtagatgcaactctgtggatttagggattcctctttgcccaggtgggtcataattaatctgtagcctcttaaaattatacctattgggctggcaaaatggcttataagataaaggtgcttgccaccaagcttgataacccaagtgggatccccggaatccacagatagaactagcagtacgagttgttcttgataggctgtatatgtggagcgcacacacacacacacacacacacacacacacacaattttaattgactttattgtcttctgtgcacagtaaagtgcatagttacaggtttgacatccagcactcacggtgtgatttttcatcattatcagtctggattcccataagatccagtggaattctctaccacatttgctaccacagaggggtgttttgttttttacgagacagggtttctctgtatagccctggctgtcctggaactcactctgtagaccaggctgtccttgaactcagaaatccgcctgcctttgcctcccaagtgctgggattaaaggcctgcgtcaccacgcccggcctttacttcttacttgatgatcatttgggttatttctggattgcatctcctaaggagaagctacagctgggtgtggtggcacatgccttttgtcccagcatttaggaaacagaggcaagtggatctctaggaatttgaggacagcctggttgtcttagggtttctattcccgcacaaacattgtgaccaagaagcaagttggggaggaaagggtttattcagcttacactttccacattgctgttcatcaccaaaggaagtcaggactggaactcatgcaggtcaggaagcaggagctgatgcagaggctgtggagggatgttccatactggcttgcttcccctggcttgctcagcatactttctttttttgttgttgttgttgttgtttgttttgtgtttttcgagacagggtttctctgtgtagccctggctgtcctggaactcactctgtagaccaggctggtctcaaactcagaaattcacctgcctccgcctcacaagtgctgggattaaaggcatgtgccaccactgcccggctcagcttgctttcttatagaacccaagactaccagcccagagatggcatcacccacaatgggccctccccacttgatcactaattgagaaaatgccttacagttggatctcatggaggcattttctcaactgaagctcctttctcaatttgacacacaaaaccagtcagtgaacctgtctacatgcttagacctcttttcaaacctaaaaacaaaactaaacaaactgaatagaactacagaaaaataattgtttcaccatccctggtccttagcttaggaactagtgacaatagatggcttctgggggaaggaaaatcagttttctttaaaggcgtggcctctaggagatcaactgctccagtgcatggccctctatctatgcagcacaaattagatgtggtggtttatttaaaacaagaagaagaaatcatgaagttgggagggggtgggtgatgaggattggatctgggaggagtgggtgttaattttatcaaaatattgtatgcatgtatgcatgtatgaaattatcaacaaataaatacatttaaaaagaataaagctgctggaaaccacagtcatgcagttcagttcattttgtgagcacatggggtttttttttccccttggcaatatggaggaaggaggagattagatcatcttatgtttaacttagaaaaagtgttaaattttccaactcaagcactgtcccgtgtgtactttgcattctcagcagcactcgtggcagtctggtttcagtttctttttttttcttttgagacagggtttctctgtatagccctggctgtcctggaactcactttgtagaccagggtggcctcgaactcagaaatctgcctgcctctgcctcccaagtgctggggttaaaggcgtgagggcgccaccacaccctgcaggtttcagtttctgttcaccagaggctacgtatgtgtcaggagccttaaggtgatctaaagctcttaggtataggtgctgaggccatgtacatgctagggttgtagtaggttggtgtggtgtgtgtgtctgtagaatcctctctaggaagcccttcttttcactaaaatcggagtttagaagcaaagctgagatttgtgttctgagcaagcaattggtcattgtctaggtcatcgacatagcacctcatagggtctcacacctgcagctgaggtttaaggtcaggctttcacttcttatattgcacatctgtatttcctgctctttgtctcataacctgcttctcagtgctggttgttaacaactcatttgcttcatcagttgtgtagaatattgctatcatcatttgatcagaggttggagtctgtttcaacccattaaggacatatagtcgggcacgccacacctccttaaagacttcaattttgtatatatgagtgttttacctgcctgtatgtttgtgtacatgtgagcttagtgccgacagaggccagcaggtgatgatacagacagaaccagagttacagacagttgtgagccctatgtggattctgggaccctaacatgggtcctctgccagagcaaccagtgctttttagcactgagccatctctccagctccagttttagttagtttctgtgtacttgtttctttctccccgcccctttccttcttcctccccctcccctttttaattatttaatttatgtgcaccagtgttttgcttgcatgtgtgagggagtcagatctcctggaacagaagttatagacagttctgagcttccatgtggggactgggaattgaatctgggacctctggaagagcagtcagtgctcttaacttctgagtgagccatgtataaaaactgattttctctttgtgaccttgaattcatagcatgttctacctgcctcaggttcctgggggctaggttactttatgtatgtatgtgatgtatgtatgtgatgtatgcttgtaatcacaacacaagcaggggtggatgcaggaggatcaggagcacaaggccatccttagctacattgtgagtttgagtatagcctgggctacaaatgagaccctgtctcaaagtaaaagtgagaatgcttatctgaattaagatcccagttaaattcatgtcaggctgtgtgtgttagctcccttctctttgctgttccctgggatttggcccatgtagaaaagcaaccttcactttgctgttatctacagattgtatgcttaagctttatgccagaaattttcatcacattctaaacagtacagtttaaattttatgagttttgttttttttccttcagtttcccacttgttattttcagttatagttgatcatggattataggagctatagaaagggcaaccatggaggaggggcactgtgatctctgcttcctggggtttctgcagaagatatctgccctagttttgctcccacatgtagcagtgtagtttgcaggggcagcaggagctcaaaataacggagctgctaattacctggtattcccttcacaccacgccatatcctggtgagtttagtcctagcttctcagaatcctagaatgaagagtcatggcagtacatggtggcttagaccaaagcacacatgggtcctttagcaattgatttctgttttaaagtgcttatcttcagaagggttcagagtgcttgtttgtcttccagtctctaggggcgctctctgtttgaccatgaatggtcatgttatagccattgttgtcttcagctcttggttttctttttttttttttttttttttttaaatgtaactgtgattttttttttttttaaagatttatttatttattatatgtaagtacactgtagctgtcttcagacacaccagaagagggcatcagatctcattatgggtggttgtgagccaccatgtggttgctgggatttgaactccagaccttcggaagagcagtcgggtgctcttacccactgagccatctcaccagtcccagctcttggttttcatgtgttttgtttttgggtttatgtaatttatataacagttgtaaaaatctaaccccaacttttcactgctatttggattctcccccttccctccaagagcacattactttaaaatgttacagggttatttctctggaaaaaaaaatctaggccaggctggaaagatgatggctcagtggttaaaagcattgactgttcttcctgaggtcctgagttcaattcccagcaaccacatggtggctcacaaccatctgtaatgggatctgatgccctcttctggtgtgtctgaagagagagactgaactcacatacataaaataaataaatttttaaaaaaaaatccaagctaaggtagtgcttgtagcccagactgcaagacaagttggcacacatctgtaatctcagggaaaggtaagaggatctagggttcaaggtcatcttctccactatacaatgagagtgtctcaaaaaaacagtgggtgatatcaatgagagtgtctcaaaaaaacagtgggtgatatcttagcagatagagactcttgctaacaagcctgatctcctattacaatctccggatcacatggtgggaggaaatagccaattcctgcaagttgtcctctgatttctccaacacatgcacacacacacacaaataaatgaattttaaaaattaaaatgagagtgctagaaaggctgagcaaggttccgagcacttgttgctcttgcagaggacctgggattggttccctggacccatatggctgctcatgactgtctcttactccagccccctcttctgaatgcctcgggattgcacctatgtgtgcacatgtagacaaagtaggtacatgcacgtaaaagaaaagaaaatagtgaaaaaaaaaaagttgtgaggtatgtgcccaccttagtaatccctgagaagctgaagtagaagaatttccatgagttccagaccagctacagacctagacaattatgcaaaaataaataggggttggaaaaatggctgtgtggttaagatcactgactggtctaccagagaactcaggttcaatttccaggatccacatggtagctcacaactgtctggaacttcatttctaaggggctgacaccctcacatggacatacatgtagatgaaacaatacatataaaataaaaatcttgaaagaaagtaaaaaacaagaagtccatttaaaaaaataaataaaattaaaaagcagcactgggtggtggtgtcacaggcctgcaatcctagtattcgggagacagaggaggtggatctgagtctgaggccagcctgatctatagagtgaattccaggacagccacagctgcacaaagaaaacaaaacaaaacagaaaaaaaaaaagccaaaactaggcaagccaggcactggtgaagcagaggtggaaagctcaggaggccaaggtcatccgtagccgtctgccacaggtcacagacgaagctgcgaagggatagctcggttgaagtgaagtgtttgctgctattccaagaggacctgagttcagttcccagtacctacattggacagctcacagctacctataactctagtgccagggcagctgatgcccacttctgtcctccaaagtcacctgcgtgcaccacacacacacacacacacacacacacacacacacataaatataaaaataaactctgtgtgtgtgtgtgtgtgtgtgtgtgtgtgtgttgtatgtaaaattcaagccagcacacagtcctgaggtacccagaccctttccctagcttcctaagctctgctccaacagaattcagaggacctggtcaccctagtcagaaagggtcctgcagttctgaaccacagacgttcaatgttgtctttttagggagacgaaagaaagtgctgggaagaaagaaaactcggtccaggtcatctgtgaaaagtaagagtgggagtacgagagccaagaaacgtcagcaccgtgtaaggaagacaaaagggaggaagctgaaggtgaggacatagctcaagtgtacagataagccagtcttgctcccctgtatgtatggccctgccgcaggaagtgtccacgggcctgtttttctgcagctcagaggtgggtaggtatgcttctaggtcctctggagaagggtatgttaagaattatgtctgggggctggagagatggctcagcggttaagagcactgactgctcttccaaaggtcctgagttcaaatcccagcaaccatatggtggctcacaaccatctgtaatgtgatctgatgccctcttctgaagacagctacagtgtacttagatataataataaataaatctttaaaaaaaaaagaattatgtctgatgagccctgaaatgtagaggcagagagggaaggccagcaggcgtcagagggctggctaagtcaaagggctgtcagtcctgtgctaggagcagatgagttaaagctcccagggcagatcgtcacctcctgtgtatgagaaggctgtgtccggtgtatccatatcaggtactgtgttctcactcagccctgctgccataaggcatatttggtacttatagacctaggatgctggggctggggagaatacacacacacacacacacacacacacacacttgcccatgtattttatatgcatatatacttgttacctatatgggttttcttttttttttccattttttattaggtgtttagctcatttacatttccaatgctataccaaaagtcccccatacccaccccccttgggttttctttaattagatattttctttatttacatttcaaatgttaacccctttcctggtttcccctccgaaaaccccctatcccctcccccttccccctgctcaccaatccacccactcccattcctggtcctggcattcccctatactggggcctagaaccttcacaggaccaagggcttgataaatatgtttcttagtgtatgtttgtaatttaaagatgtgtttaaatatttagtagttagaacatttgttctgggcagtcagaacagattcttgtggcagtgattaaatttatgagcaagtttgatcgatgataatgttctgaatttagtgatcattagcactcacttggtgccctgaggcctaagggcctgactgtcagttcttccttcctagtttccagaaagctctagaccattctagattccaatctgagctcactttctccctctgcaattactgtggttcctttttccccctagtagaacgtgtgggactgtgggccatggtggaagtgtggagagatacactccttggggagaggtctcagctgagggtgttgactctgttcaatccttactcagaatttagaggaagtggcatgtggtcctttgattgtagtatctgagactgattacagccgtgcagtgggagtgttaaagtctacaaccgttcctcatgtggctgtttaagtgcaatgtgccccgcattcatttaattttcttcctgtcacgttggttcagaatgaagtcacagctcgttctcgaattgcacgaacactaggcctccgcaggcctgtccgtggcaccagcatgccatcagtgtacaagccagtggacccctccctcgggctgatgagggcagacattggagcagcttccctgtcactgtttggagatccctatgagctggatccttttgacaggtaattcagtgctgactgtcccagtacccagctcatcctctgatgtgcttaggctgcatgtggcactgtgtcggtgtcacagagctgctctgtcagtgtccccttggcatgtgtcccctctagcaatgaagaacagtctgcagatccaccttcccctctgagtgccaagaggagagtgctgtcccgctcagctctgcagtctcaccagcctgtggccagacctgtcgccatggggctctctaggtatgtggcagcagggccatctgggatgggtgagggcactgggctaagtcgcttatccttcccatgtggcccttggtgatgtggctgagcagctactcctggtgtgatgtgcttgagttgaggttggctcgagcgttaagtcaaagctaattgtctcagggtcaagtagtcaagtagcacatctgctagtcatactggccttagtctctaaaagggaaagggtccttgggtgaggcagcagtcctggtccacagtgaccaacaggtagagataacttcactgccagctcatgcctaatggtagagtggggcatacatatgttataggtgatctccccacaagcttgatccccgagataacggctcatggctgggaatacagaggaccatgctagcagaaccactctctggtctgtctacaggaggcagctccctgctgtggccccagagcccagcgtggaggaggcccccgttcctgacctgttgggaagcatcctgtctggccagagcctcctgatgatgagcagtgctgatgttgtcatacaccgggatggctctctcagcgccaagagggcaggtgagcacccatggggttgctgtccttcctcattgacttgggaatgtaaaatcacagtcctagaaacggatgagttggagaggttctcagactttgccctgaattgggggcaacactgctaagaacataaccagtgtgagttctgtcagggtcttccaaggcctgcgtagttgtgagtgtgccatttctaggacagttcagatgcttagtgcacagtgccccatgaatcatcatggtcgagagtggacagtgcctctatctgcagcttcttgtctgtcacactgaatggaacacgtttgaaccatggtcatgtctgaaaagagaaagaaaatgtcaggggtcggggtgggggggcgtttatgataccataggtaggacagctgacctgtaacattcccgttgtgttgtgcagggactattagtgtccactctggaaacagagtagtttcagtgtctgttctgatcatatttcacatgtcattgaacttgttacaggaggtgggaagggttgctatctgacttctgttttttagctcctgtttctcttcagcgaaattctgtgactcaatccagagaagagtccaggctcagagacaacccgcagcctggggcactaccctcagagagtgcatctggtggattcgtgggagacagacaaccaaactcagggctgagctgtgggaatagaacagctctgtgctgtctccctgcccgcattgcccagacacctgtgaggtcagatccctcactgactcctcgctcaggtctgtctaggaccctttcagatgagaacaggcccagccggacacacagcagcagcccccaactcaatggctccaatgtacgggttagttctgcctcgactaagatcgtgactcattctagctttccatcgaaaaatacagcttctgggcttcctcagagaacaggtcccaggagacctgatttctccaagctacccaggataccaaagatccatcgggatggcaataagagcacgcaggaccaggccccagccagcggccacattgtcgagctccctagcacttgcatcagccgcctgactggcagggaaggccctgggcagccaggacgaggccgagtcgacagtgagccaagcagcaggggtccccaggagactggctcacacacaagtggttctcgacctcctgcgcccagctcccatggcagcttagcccatctagggccctcaagaggaaagggcattgggtctagctttgaaagtttccggatcaacatccctgggaacactgcacattgcagccagctgtccagccctggattctgtaacacgttccggccggtagacagcaaggtgcagaggaaggagaccccgttccccctcttctccatcaagaagccgaaacaactcaaaagcgaaatctatgacccctttgaccccactggctcggactctagccctcctagcagcagcccagagagtcttggtccaggcctcctaccctctgagatcacaagaactatctccatcaacagcccaaaggccccagccttccagactgtgcgctgtgttacctcctacagggtagaaagcatctttgggactgagatggaacctgagccccagccccctagtgagcctgtatctggcatgctggagttactcagcaagggatctgctgagggaacctctgatttggagcaagagggactaggggaaatagagcctacagagattcggggctccacagcccggacacagaggccacccccaccagacccttgggatgatgaggacgaagtgtcctgtacacccttctttggctctgaggaacggacagtgacgtgtgtgactgttgaggagccaggtgttctaccaagcccagatgctccacagatcaccacccacagaattgtggagttcagggcctcatcccgttcccgctccacctccagctcccgaagcaggaagaaaacgaagaagaagaagaaaaaggttgccagagagcaccagaggacacgctccagcactcgctctggctccagggacaggacttcacgctcagtatctccagttgctgaggaacacaccaggaggcacagagccaagactaagagccggaggtcttccagtgaccgtgccagcagccaggacagagcaaagaggaggaaggacagagacgacagagacagggagcataggcggggttcctggggtcatggcaggtgccggcggaagtccaggtctcgctcagggagccctggcagttcttcctgtgagcgccatgagagtaagagacggaagaggcgacattcggggtccaggtctcggggcagcagtctggagagggaccggagacacaaacatcgggagaggagccgagagcgaatggacaagcaggagagtgtgacccggtcccgggagaggaggaggtggcgatctcggtcgcctagcttggagcataggccacgaaggccaccttcccgtgagaagcgtgcccattccccagagaaaaaggggcctgtgagggaggtttccccagcccctgctacacagggggagtcgaggcaggatggagaccactctgctgagcctccggtttcagaagtaagtgtcttgcctgaggtagtaagtgtcctgccagaggtggttgtggctgacctgaaccctccagaagtccctcctgtcctggcagagccagttgcccatgtgcctgaggacctggactatggtgagtctgtggaggcaggccacgtctttgaggatttttcaaatgaagccatcttcatccagctcgatgacatgagctcgcctccttctcctgagagtacagactcctcccctgagagagacttcccaccaaatcccatactgcccccagccagccttccacaagacagtactttacctaccatccaaagggaggtgttacccattcacagtgaagatatctcaaagcctgtgccccaggccttggccccatcagaccagagtctgctcaagcaagacactgtagagatcaccactacaactcccagcaccccagctgtggtgcccatgacaaaggacagtccggtgctgagtgcaagaggatgggaagcagtcaggcccagggatgctgtggcccaggccccactgctacgatcccgaaccctggtgaaaagagtcacctggaacctgcaggaagcagaacacagcacgccagcagccctggacagagatccaagtgagtttgtcctgcccccggctgggaccctggtggtggttgtccttatgggtcaggggtgtagagcaggcatgaggcagtggggcagcctccctaagagcctctcctgacaattttggggcccctacccaagtacagcttctaacagacacatctgcagctcggcctcggttcccactgctggttctctgaaaatgttttggccagggttgaccacaaggcatccacactccctgtctgttgggtcctcagggacaccacttcagaggccccagaggccccaggaaggagactgggatgcagaggacagggccctcataggatttcagcaggcaccattctccgagctgccccctcccatccacgtgctccaggagtctgggttacctgatgcagatccctctcaggtgggtgctgggctagagggacatggtccttgtgctgggctttttgggctgccctgcctagggcttagacctcatggtactacttcctttctatacagccccctggtgctcccagggcagaagggcttccagctgctgggactctgcactcagcagggggtattcttgcccaggtttacagccccaacatgccaccacccttggctcagccctcaagcatcctgccctatgcactggtcagccagccctcagtccagttgatcctgcaggggacccttcccctagcaggctgcggtacagcacagagcctggcaccagtgcccacaatgccagctacagtctcagagctagctgttccaaccaccaacaactcagaagaaaggactgctactcccaaaacagctgctgagaagaccaaaaaggaggaggtgagtgctgctgcctgtccttccacagcccctgtcttatttgggcctgattttaggtagagtatccaggcctgtgggcttggtcagggtggtaagagagcagccagcccattgcctttagtgttctttggcaaatgaataatatcccagaactcctggcttctcgccaatgggcccgcaggtcagttttggccatcttgccacagggtcacacatgtcctcctcactcctagtacatgaagaagctgcacatgcaagaacgggctgtggaggaggtgaagctggccattaaacccttctaccagaagagagaagtgaccaaggaggagtacaaggacatactgcgcaaagccgtgcagaaggtaggctgcaggcaggcacacacatgcctttttgggaactctgaggttgcaagggacacattgtgacacagaatagctaaatctgtatgtgtcagctgccatttctagtttgcatggactcctgggtctgtaagtatggagtcagccagctctcacaaagtgccactcaggcaatgctcattaaaactaaaataatagatgaggaatttcagatgtcctcaatccacccaatttctttggatctttggaggaactaagtctctgagagatgggcagatttttctataggaacaagttttagcttccttctgacctctgacacaggaagataaacctcagcagctctgtgaagtgtggttacagatgtgtgtgtagggtgggcatacaagtccccttaacaagatcaagggcactacttgagatggtcaggacaaggaagcttggttgagttgatctttgtgacaagtcgagagagcactcagaaatcatgtgttcttcctccagatctgccacagcaagagtggtgaaatcaaccctgtaaaggtggccaacctggtgaaggcctatgtggacaaatacaggcatatgcgcagacacaagaagactgaaggtggagaggagccacccactcagggtgctgagacctgaggctagccactctctggggaggcatccccagcgggaaagaaatggggccgccagcactcctgcctctgagggtctcatggtacctgtctgcacctgtcttgcttataattgaaaactggacttttttatatgtatattatagatacactgtttccattgtgttctaatttatcaaaaatggcttatgtttagaaacttttctatggactgatgcttagaaggtgaagcggtttttggtttcggaaagcctgacggctcagtggaagcgtctgtatctgccacaaagccagctgtcagcagtcgctcaggaccgtccctgcttagcagttctcttcctctagctgctttgtgctcctgtcaggagacaggacatagtgctgtgggtctcagaggtttaggcacacacaggccccaccttcccaagtacacctggcatcggggtgttcccgattcctgtcttagagtgtttgtgtccagtaagagctgtgctagcctagccagttcttgattatgaaagtgagtgctgcaaaggaggcctggtgtgtagggactgggggtcaccttctttcaagggactctacaaggtccactagagacactatacagcaaggagcagacctgacccagggctccactgattttgaactatttattgggagttgggattctgagtcaaggccactgacccaggtccatgaggaagtgttcgatgtcttcgtagagactgttggtgctagacaagcacaagccgagactgctgctgtccagggaggacacaccctcacgctgcacgccctccaggtatgccttgcatacccatggctccagctgtggaaaggacatgtgttaagactctttcttacctagcagcccacaccttcccttggcccacccaggctctaccttcaccaggatcagggtcttctccttgggcctccctgctgacaagtcttgcccaaaacccaggtagatggtgtagtgtggtgacccttgccgcctccgagcccgaaactcctccagttctgttaaggagatagctctggtgagcaggttaagaaaggctccaggccccagaggacagcaccccagccagacaccttactgacctcggaagaaagtgctgaagtcgaagatgggggtgtggcggttgcgctccagcagctggggtggggtggaggggccggtagtgcccatagggctgcctacctcccagtacaccttgcacttgcccatacgcagggcccacagtgacggtcctcgaagctccagctgaaggccgggagacacatgctggagaagcgtctctgtgtagtgcagctgcttctgatctgggagctcagcaggactgggaaagatcaccggctggggctctgaagttcttactgctggggccatggggctgtacaggaacacgcatctggggtgccccaccactgcctgtagcactgtgcggcccttgtacatgatggtcacatccaggaacccaaggctgcgctctgtgtatagaccatgctgtgagtggtaggtttgggtggagcattttgtcccatgccccctgccaaggacccattcacctcctactgagatgcaggtgtgaaggagcagtagggcagaattctgcccgggaggctaggaaaagctgtgctagcgcctccgctctagatcctcaccggtgagagctggctgttgaggcctgggactggggacagcttccacctgccatgctgcatagggttcctcgtaaacacggtcttgctcctggcctgagggcaaattggagctgcctgtccatcttagcccagcttcccacccctgtcattttaacatccttatctttcctcctcccagcaaggactctgttgtcctccctctcatacagccttgggcagatgggtgttctctagcttagccccagctctgtaacagtaactgcctctcaccaggagcctgtggtgggacggggtctgccccagactcggattccagtatgtggctgtactgcagaacctgaagcaagaggtccccggcatcactagaaagcagagggcttggggtttggagcccagcattttctcttgccagaaatgatcctggggacacaccctgtaatagacagcatagtggtaggcacctgccgatcccccacacctaggaaggatggaccagatgtacctgtgtgggcagagcattgctgaggctcacttcttccctattttccgtggctgggcccactgagggagaggagtggggaggggagatttggttacgatgcccaagcagttccaaaagttctctatttctcataccctctgttcccaaaccaccaggtacctcactcagcccaaggctctgacttagcaggaagtgtgcactccccctccaccccgacacacacacactttggaaggagaggaactgaatctacaactagtttcaaaaaccacaaatcaaaccattgaaaccaccaaaatgacagaggccatgtacctccctggcccatccctgtttgtggcactgctcaccagtagatccaagctcccggctaagttcgtacaccttatgcggatcaactggatcccctgaattgtcttggcgcaagataaaacgccctgtgctgtggagtgcacagcggaagttggtcttccagcctcttcgctctcttcgctcagcagcctcagcctctgggggtggcaggttaactccactaggtggccacctccctcgggccacagcccaggcctgaaggagaggagagagcatgggttgaggctggattcccccaggagttctggcagattataaagagggcaggactgggtaccaccttgaagatctgtgcatcttcttcatccagatccctacgaccgaaatgcttccagggtacgcggaagactgtgcgagcctcgttcagccactgcagcccctcgtactggccgctgctgacctcccccaatagccagtctccaaacagcactcgctggacccccctgcaggcagagcagccacgctggggttagggctaatgtaagggacacaggacccaatacaaccagggtagacatgttctcacctcacttcagccattgctccgtctacacaggcagtctgggagaatcaaagtagatgctactactctgtgatgccttgtagtcactggagcagtcagctattgcaaataaggccccttgggtgcctctatggttttaggttgtagccacagatagtgtgaccaagtttcacaaatgtgttttaaacgttacaagtgttggtaacaggtaggaatttcagtttcacaagtgtgacccaggtattagggtgttgagggtcacagatgaggtttgagaacttgtggtcacctaggttcagaactcagtgtagattcctctgccaaggtggctgtagatgtgactacagatgtagcgggagcgcacacgtgatgtcacaggtgttaatccagcgtccgagcctggatgggctgtcacaggctggaccctgcgaagacacaaaaggggcgggcccagacgagtaaaacgaaactgcatctcaggaaaatgaaacctaaacagtctaaacagcgcccggtagctgctggcttcccgctgtctccactgtctccatgcctaccagtgcagtcctcaaactacacccgacccttactcagatcccaatccctgcagacccaattgcaaatcctgccgggacgtctgccctcctgtttcccccgagcttctcttcactgcccttcactgatcactcactactctgtagaggggacaagaatttcccctgtggcactagctcacctccctccccgagtggcccaagagtcccacatacctggtaccggagccgccgggacgggttttatctcagtgaaaaggagggtgccagtgcttttatagtacttcgggcagaggcggggcagagcccaggcagggtgtggcttaagggctccagacgtcactagggtgtcactagtttgtagcactcaattgcaaatccttccctcctgttccccccccaccccccagcttctcttcactgcccttcactgatcactctctcagattcagtcttccaggctctttgtagattcaatgagagaggctgaccctgctttggacagaacagccatgtcttggaggacagtaagaatagtaagtaggtggaggtctatctgccaggctcagcccctggtggaagtgtgggaaaggtctttccccaggacctcttcaggaaagcacattgggacaaggcagggatacccacaacagtcagtaggttttgtttgtttatttgttttgtttagctggctgaaaaaaatcttagaaagtggagtctaaagagagactatggtacaatttggcttaacactgagaatggtacagataagaatataccatctgggggctggtgagatggctcagcaggtcagagcacgactgcacttctgaaggtcctgagttcaaatcccagcaaccacaaggtggctcacaaccatccgtaacaagatctgactccttcttctggtgtgtctgaagacagctacagtgtacttacatataataaataaataaatctgaaaaaaaaagtaaactgggcatggtggtgcacgcctttaatcccagcacttgggaggcagaggcaggcagatttctgagttcgaggccagcctggtctacaaagtgaattccaggacagccagggctacacagagaaaccctgtctcaaaaaacaaacaaacaaaaaacaacaacaacaacaacaaaagtataccatctgggaagaatataccatctggacagaggttgaagcagaaggattgaggccaacctgtgttatagagtaagaccctggaagctgaagaggcagctcaatagttaagagccctggctgctcttccagaagtcctcagttcaattcccagcaaccatacggtggctcacaaccatttttaatgggacctgatgccctcttctggcacacaactaaatatatataatatatctccacagtcaagggttgtgtccatccttcttcagagaatcttttgttttgttttgttttgtttttgttttttgagacagggtttctctgtgtagccctggctgtcctggaactcactctgtagaccaggctggcctcaaactcagaaatccacgtgcctctgcctcccaagtgctggggttaaaggcgtgcgccacccaccatacctggccaaagaagcttcttattgcagtgggtagacctttagggaagggggtgtcctttattcagtgattaaattgtccttgttccagctgggtcaagaagctagaactaagaaatagcttagtggttaggggcacgaactgctcttcctagacaacaggggttcaaatccagcacccacatggcagctcacaactgtaactccaaaatttgacactgtcacatagacatgcatgtagatcatacactgatacacataaaagtaaaaatttaaaaacaccaaaaccaaacaaaacatttaaatagaaactagttaaactcagagggatactgagaagacggaaaaggaggaaggggacttgttaagaaggcttccaacaagggggaaagaaaatgacaagggagactggggcatggaaatcaccagccgaaatgaaagtcaaaagatacattgtatgtataaatgcataaaactggatatttaaaagtattcagggctggagagatggctcagtggtcaagagcactgactgcttcaccagaggtcctgagttcaattcccagcaaccacatggtggctcacaaccacctgtaatgggatctaatgccctcttctggtgtggctgaagacagttatagtgtacttatatagataagataaataaataagtctttttaaaaaaaataaaagcattcaaatactttggaaaggagttcagggtcacttttcattagaaagcatgccatgactgctgttcaggaagaaggccagattgcggggtgcacactgtgtgtaactaccgtagccctggttttcctccattcacttacatgacctgtagcttcctatttctcatgtctaagcttcctgtgtggggcagagtgccctgttcattgccaaagcagccttcctttttctttttcctcagaaaggctctctttacattaggtttgccttccctggaactcactgtggagactaggttaacctcaaactcagaaagacctgcctgcctctgcctcacacatgcagggattatgtgagctaccactctcagccagatctttgaaatgggctgtgaccctcatgagggtcccaaacaccacgtctcccaaatgaacgtgcgtgtggagtggacggttctggctccttcccctccctcacgtgaagctgtccatcttgggcaaggagctggagctctctagctttcctcttagctacagtgggaacttgcttgtggttagccacccggaagcccgcagctgggcgctcacacccatggcactcgttcccacacacccgccttaagactctggaattcgaaagtgctactttaattagacgaggaaagggaagtggcttggggtagagagtcgggcgctgagctagatgtaagtgttgtcagcatccacgccaaagcggagagtcttcttctggtcagggtcatcatcatcgctgccctcacttcccgaggcactggcgctgtccacatcggcggtgggctcgttgaggaccaccacgtcagcctctgccccgatgtccttgccgaaccacacagccttgtagccgccctccccctccggccgccgctccttagtcaggatagacctcacggctgaagggctgtccccagcctggactgtcttaggagacccggaagctttgggctgagggctaggaggtgtggagctggggggcgtaggactggaggacatggggctaggaggccggaggggcggctgggcaagcttggggctcggctctggcttccggttgggggtgggcgaccacttggccttgtggtctgggaggaaggtcaggttgtcatagccacttggctgtggctcctaagggtggagtaaagacaaaggcatcagcagccatgatatgactcccacgagtggagtgccttctgaaccctccttccaccgcttggctcccactctcttccccatcccccttggtctcagaacacccatcctagcctacctccatttccttccctagtaaaaccctgtttcccccagccgttcccatgcatccctccatgtcccttttctgtgactcctcagccctgagttagtccccttaccgaagccttcccagagcaacaagcgagccgatgtcggtagtgcttatggacgaggatgaccaagcagatgagggccagcaacagcagtgcacctagcaccccgcccaacactgccatgtccaccgtggaaaatctctggccatcaccctgctcgcctgctcctggtgtgcaagagaacatggccacttactgttggaacactcccaaaaacgtcccttcccaacctgggccaggccgaggtaccatagaaacaaggcaggcctctcctggcccaccatctggagttgcggttctgagaatgggtgctaccaactccactaggaagcctgcctggggataccattgtaacatgactactagcctctgattcaccggggtggtcttcaagggcacactgtaagcagctgtagtgaactttgtcttatgtggcttcaagttcaactttgaatacatattatacttagaccagagcaagtctaaggtctcaatgacacttgccaaagtggctgcctcgttccaatgcgacagctagccatgcctggccccttgtgaccatgttcactcaaaggtttagtggatacagcttagtgaccaatacaaagacctttcagggggaacctcgtgtgtgtgtgtgtgtgtgtgtgtgtgtgtgtgtgtgtgcgtgtgtgcgcgtgtaaagtttactatgtagtgtatgtatttgtgttggtgctgcatgtcacagtgcatgttgtgctcagaggaaaacttggcagaagtcagttttctgcatgtgtggaaaccagggatctaacttaggttgtcaggcaagatgctgagccatcttgccagtctccacattactttgtaagttggggtctctcactggcctacagctggccttgtagctggctaaactatctgtgttatgagcttcccggggtttcctgtctctgactccccaactctgaagttgtaagggcgtatcctcacacccagctgtgtaaggtgatgaccaaattcaggtcatcatgctagaaggcaaataccaagagcgtcattgtcatctcccagccctggatagtttttgtttttgtttttgtttttgttttgttttagcagcattgcctcagtatgttgcctaggcaacataagtatctaagaacctaagtatctccagaatcacaggcatgtatcactatatgcagccatgattgcttttagacatgttctctctctctctctctctctctggctgtggctggactgaaattcctacatagatcaggctggaccaggaccagactgggctgaactcacagagatttgcctttcattatctccctagtgttgtgactaaagggatttgttagcacaacagtcatttttatcttgtttctcgagtagtgctcttacttaacctaagaccctaaatacagattgtcctgggaattatagaactcactggctctaaaatctgcttctgcatccctataccttcttcagttcacccccattctgacctcttggggccatctgtctagagccagacacagactccttggaggtggtcattatggccaggccaggctagcctgggtggacccttttctagagcacatcctatagcccttggctgagttaagactgacagtgaatccagggcaatgtgttggactacctgagatgggcccagtggctgttgactgagaggttcctggcttgggggtctgtggtgagctgccactaggtgtggctggctgagaagaggtgctggcccctggaatggggaccattggctgagaggttcctggcttgggggtctgtgttgagtcacttctggatgaggttgtcatgagggaggtacttgttctggaagtaggggctgttggatgagaggttcctggtttgggggtctgtgctgagtccccaccaggagtggttgtctggggagaggtgctggttccaagagtaggggaccccccaggtatggatgaggcaggggtgggtggtcttagagttgtgccaccaggtgggaatgggccaacacttcccccagagctggtggtggcaggtctttgagaggtcccagaggtcaagggggcttccatagtggtgttacttgaaggcccagtcgttcctccagcttctgggggtgtggggaactctggtggtggcatgtacaaaacttgggtttgcctctgtccccagatatgcctgtcccagagggggagccaccctgcttgggaggccctgggggctcacctgtggagggcagttctcgctctgacacctggatctcaacaacagcggtggctgtgtccttagtcacagtattgctagcttctacctgggtcaggaaaggggcttgttcctcttgggtccctctttacccccacacctttggtccccttatccccactccacctctacacggatggttcttgcttcctccataggcacagcagtcagcatgatatccttattcatcatgaattctgaggagttggtgactcgatatgtgacagctgagttgaggtcctagatgaggcactacagtaagacataggcctggtgccctactgcccaccccaagcagcctggacagagagaggaggccagagggtccaggtatacttatagggttcctaggtgaacaggggggggggactgcataccgggaagcctgggtactgagcctggatcctcaggatctccgaagggaaggtcttgtccttcactgctgtgccagcctcagatcccagtaccactgtgccatagtacaggctctgggagaactggagtgggtttccagtgacactgcgagcctccacgatggcctgggtcactgagtattgagccatgtcttcctgatcagcctgaggagtcaggggaagcaggatttaatggagctacaactgggaacacagcaggggacacagctggggacacagctagggacacaggagacccatccatcatccagtaccggtacccaccctgatcagaagggtgaacttcatggggctcgggatacttttggtcattgtgaggttgccatcgtgtgcgttgatgatgaatgtgccatctgtgtttcctggaagaatttgggggtggagtttggtgtctggtccctctgttgtgggctccaggtgctgtggagctaagccctcacttacccgctataatgctgtagatgatagactggttaatggcctgatctccgtccacagcatagatgggaccaggactcatgatgaggggggacggctgtagggatagggacatcttgaggtttcagagcccccgctcttactctcttgttgcccctcaagatctgaaacgtgagttggagcctggagggaggggcagtgcctgcttgggacagagctgcggccacagaaggactcagtggcaacaagaacttatgaaggaaggcttgcagcttcagtgtatgcccctctgcacagtggaggctgtggtggccttggcgggccaccctgcccagtggcactgctggcctcagaggagactgtcatctagacaaggacttagcagtcccttattagcatcagccctgctcctgaagtcttcacatcccagcttacataacaggatccacactcctcactgatttttgccccacccccaggagggatagttaatgattgattgatgattaattgatcgatcgattgattgattgttcatgtttgtttcttaaatcacagaactgtctgccagcctctccagaagcacagggccatggctggatcccttccctgaacgttttctgacttggctctagattcaagtctgaccctgggcctgggcctcctttctccccattaccagtttgtgtcccgtggggacaaccgcactgtattgggcatgaatgcagacatagccatctgtgaaggagcatggcaggaaccagggggtccgtaggtcagctggcagcgtgttcaagaccagggtggcagtggccgtgtggctgggctctacattttcctcccaagtatcctgtagtgacagccagcccctgataggtcaggcccagcttggacaggacctagaacacccaggacttaggaagatgtgatccacttacccgtgccagcagcatgaaggtcatgttctgattcttgaagtaatccagggtctggtccaacttcagagcagggtagtttacgccctccagggagaagaacttgctggcattctgtggaggggaaggaggtgggactctggaaggtggagaaactgaggcctgaaggcatcagaaagagtgagggttgtcaataatgagtggggctggggaagcactgacgggggtcacttcctgcagagtgtagactaggatgtcatttatgtcagcatctgtagccttcagctgtgtctcagggatgacggttgtattcactttggtgtcctgggaatggagaagaggaggttggtccagccatgctgtggtttctgtatatagatcttcccgatgtggtcccgcagacaccctgtgtccccctgcagacaccctgtgtccccctgcagacaccctgtgtccccctgcctctccatgctcaagacagcactggttccgactgggctcacctccgatacattaaatgtcttgatttcaaaggagaattttggcgcattgtcattgatatccaggacagccacaaacacctccaggcgtaccacctgcagcaaagtcaccaaagtcagcaatgctctgatgacccatcattcattcattccttttcttatctgtttcattattcttatcttattcattcagtcagtcagtcattctttccctttcattccacagctctgatggcagcaataatgtggtggcctgtgagctactgttctaggaggaacgtagactgtaaaaacaagttttagagtgtggccacatgtgtgtggtgggtgggctgaagagaaatgatgacaatcccagggccacaaccagcaacgcatcgaagggagaaaaacagcctctcgcggcttcagaaacaggtctccaagagaagatcagagaaaggggcctttaggttaaaaccaaacagctttattccatgagagaacccttcctgagacccagggagaaacgaacacagccaggtgctggaggacagagagaaagctgttcttctcaggtgtgacagataccaagtccatgcctctctctgtcttcctgtttctgtctctgtctctctgtgtatctgtatgtctgtgtatgtgtgtgaattatattcatgtgttgaaggtggagcccagggcttcaaatcatactaggcagatactctaccactgaactataccaaaaaaaaaaaataagttttgtcttgttttgtttttttaatattactacctattagagacgtggcccaagatgtgtgtggtaacatgtcatggagccaggtaggagtgcagggtgtgagagttgctcatggtgaagcagaaattatgtggggcctgttatttcttcgagcttcctttagtaaaaggcttgtggtggaggctgagggatacgatgtatgggatagggtagcggggcagcataacgtaggagggttaagcatcaaaatgaatttgcataccagatcagtgtctgcatgccctagcctgcctcacccacccacctgtgcatttagctttggagtccggtaagaaacgtagaagtttctgtgtgaggctgtctggggttgtggttatgactctctagggattcactatgtgggggaaggaatagagaaggaccaagggcacggagagcaaatggatctgcggcagggtcagaaaggagacctgctgcccaaggccccgtgggactagaggtaggaagagtagggctgactctaactgaggcacaaccgacaatcccaacaatgtacctggggtggggtgacctcaaaaggggcctaagtggctggcaggtgagggatgagaggcagacttagggcctcagggtattgacttaatccacagctctaagttagctgactttgagtctggagctcagggaagtctaggctgaaagaagcaagcgtgggagtggccaggagagagctgaggtcatgggggaatggccttggggtactctgacagaaggcagaggtgatcaggtactggggttaacttaccaccgcatctcctctcttacactccacatctgcctggagcaatgagttttcctaaggatgaagccaggggccctatgagtcacttgccacataaggagctatgctgctctagaacgggagagtacggctaggagagcaggtaccgctccagcgccccagtcatctgtgggaaatcctgggtgtgtgggggggggcatttggcagctttgtcccctacggccctccccctcagtaccaaccaaccgaccacagggcctgaagggttcctcactcagggggatagagaaccctcagcccctccttccctgaatcttccccaggttaggaggcccgcccatgtatgtctccatgaaggcacattccatccagcctacagactgtacctcataatctggagtcacgttgagaaacagatcttttccttcgatcctaaaggcataaggagtggacaagggtcccaaggtcacgtgcaggccgtctgggacaaaaatgttcaccagtggctcagaaacagtggtgttctcctcgactctaaatatggtctggttcacagagcagactagaaagttggaaagaagaagttggttcctcatcagagctctgccacccacctgtcctgcccctgcccgacacataccctgggtctgggccaaggtccccggaggttggccaaacagcactgtgagccatggcaacagcagggaaggccacaggagggccggagcccccatggcggcagctgtcacctggaagaaggatccagcttgcttggttccagggctggtacaattcctgccttggcgaccttcgcccctgccaggcaccgcctcattttatgaccctttacagatggcctctatcaaggggactcccgctggccggcactaacaggggacatgaggtcatatttcggcctggacttccaggaagttagctggagactcaacccacgggaactacacataaggtgtatgaagcttgagaacaaggaggagtggagaataggtgtggggagccagggcaaggctctggggccatagatctaaggaggctgagtcagggctgggggctgaagcaggcctgtgggatggaaccatgggtctggggagctggggcagggctatggggagctggggcagggctatggagagctggggcagggctatggagagctggggcagggctgtggggaactggggcagggctgtagggagctgagtcagggctgggggctgaagcaggcctgtgggatggaaccatgggtctggggagctggggcagggctgtggggagctggggcagggctatggagagctggggcagggctgtggggaatgggggcagggctgtggggagctgggagcaagaacaggctgagccattgggtctactgtagccctcattggggtgtccctcatcttgtctctttctcctcagtgttctctagcaaaatccctggagctatgtcatgtcgtctcccttcccttccctcgtccactcccaagggaaatggctgtgtcccagtatgctcctgctgtatgagaaacacagcagttcccccagggtagggcctggcagagccttggttggtgttaggatgcagatagaacctttcagccacagctaggagctggggtttggggagccagtatctgatggaagacaggaatcctggtgaggacacagcccaggcctccattagatatgcttcctctccttttgcctgtaagctctcagagataggaagaaggccctgggtgggatcaggagggtcgtagggggtgttctgttgaaagggcctgcacagctctcactactgtgggcctttgcagggctggctgctttaggtgtctgaaaaccttcccgaggctccaagcctctgcaaagactgagcactgtctcacaacccttcactggtcctacagctgcctactgggagatgacatcaccgtcaggcctcaggcctagacatgttagagccaggatgtactcaggtcctcccactcataagcggacccctatgaccccgcctgagcctcctcctcaccacttcatttaccctggccacatggctggaccagggtggggagtccctgatccctagaaattttgctaaatggaccacagggcaaggtggcactctagggaattcagctgggaaaagaggggttcagctgatgccagagataagaaatgtcctagctggcttcttgggttcaaagggcagctgggtgtggtcctagccactgaatgagatggctggatctgtccacgccttccaggctctcggagcagaggcggccttcattttatcagacatcacacaccatgagctaaaagaccagggtctaaattccttttttattgatgccaaggacaaccaatccctactccagccagggtcctagagactcttcctccctcatctgggtggcctggttgtttcagtccactctgaacgatcaacagcagaccttggtccaggaggcagccagagagacagggacccatccagggacagcctgggcagaagcctgtggaaggagaggggactagtgagtgaccatcagagtgcgggtacccacctggctggggcactttaggaatccagctgaggatggaaaactcaccagtcctgtagggtctgagtgttcgaccacagcaagcagagctggtcctctaagggcttggaccgggccaggctgttctctgggatattttctgtgtcctgctcgctgaccccacccccacccccacgcccaaagtagaattagtggtgtacagggatgtggcgggcctgtcccatactagccagtctggaaaattctacctagcgcgggctcacctgcgcttccccaccagaccctgcagcaggcgctgcagcctggcactgtcctgcaagcggctgagctcgctggtgaacattccgtctgagtgtcttggggtcctggggaggggtgaagccataagggtcagaaattgaagtgtgggcgtggccgggatgaaacggattcccaaccctgctcacctgggaggtgcagggagcgcggcggaactggagagcagcagcagcaacagcagtagcatcggcgtgggcagcggaggctccatggtcgggctctgggtgtgacaaatgctgcaacttcagcctgagccccgcgccaccgctttatagctgccgggaccgccggcggcggtgggctccagcaccgccccggctccgcgcggccggccccgcctcattgattgcaggaaggtcagggccgcccacccagctgtcgtccggccacctcctgtccctaccgccgtgttggcgcccctcaactgccttggggggggagattagaggagtagtgctaccaagtagcgaaatggacatcttcatctgtgtccagggatagaaaataggggtggcagttcaggacgggcagagcgaaccgcactgtgagacctcaactcatcttggagcctagcctagaccaagaccttgccgcactcttgtctggaaggagctgtaggtgtcttgaggagcctagggcaggcagacgactgagaggaaaggaagaccagtgtcctagcgctcctgctgaagccagggcagggtagactactgcagataaccaccttaagggcagctcagcaccagaaacaaaatgggaatcctcgtaggcctggggttgcatttttggatggaaggagacagtttatttgaattggtagcagaaaatggagataggttagaataaaagaaacgcaggtgggtagaggttgtaaaggagttggggcggggagctatggatggggattgaagacaaataggcttgcagaacatcttcatacttggagtccccgaccttagtggtagcagtacgcaccaagacctgagttcaacccagcaccgaaactcaaatcaaaaaagataacccttggggctggagagatggctcagaggttaagagcactgactgctcttccaaaggtcccgagttcaattcccagcaaccacatggtggctcacaaccatctgtaataagatctgacgccctcttctggtgtgtctgaagacagctacagtgtacttacatataataaataaataaatatttaaaaaaaaaaaaaaaagataacccttaatatcaaattacaaacccagagaactgttaggagctaactctcagataaaaatcatatggttttgtttttttttaattttttttattaggtattttcctcgtttacattttcaatgctatcccataggtcccccatatccacccccctcaatcccctacccacccactccccctttttggccctggtgttcccctgtactggggcatctaaagttggcaagttcaatgggcctctctttgcagtgatggccgactaggccgtcttttgatacatatgcagctagagtaaagagctctggggtactggttagttcatattgttgtttggttttgttattaggaattgtttctttttgttttttttggggagacggagtatttagctcacgttgcctttgatctcactatgtagcccaagttggcctggaccctcaacagcagagattgcaaatctgagccaccaagaccagctctgtttgcagtttgggaggaggggtttggcagcttgggacttctttgctttgcatttttgagacaaggtctcatataccccaggctggccaggaatttgttacatagcttaggataaccttgaacttcacatcttcctgccagtacctctggggtactggtattacaggagtgtggcaacatggcctagttttacagggtgctaggagtggcccttggggcctcaccagtgttgtgctgtgctagtactctgtcaaaggaattccccattcctaaccctctacaggaggctttaaaaacaattagaagatgttttagagtcgttttcagtttacagaaaaactgaactgaaagcatgggatttagttccttcatgcccctcacatatgccctagagacacccccccccccctttctgttctggagcagaactcatagagtccttgagctcagagatccgtctgcctctcaaatgctggaattaatggcttgcatccccaccccaggcttgaacccatgtcaccacagcagtatcataaagccctgcagttgtcaccaggggccactttggggttgtcattctattggtttgggcagtgtaaactgtcatggatccagttccatagtatcaaacgcagtagggttgcagccctgaacagtccctgtggaaccgtaatccttttgcccgtagactcctgaccttgtcactgagctggtgtcagcgttggaagcatcgcttgcgtccttttcaccacggcttctaaatttcagaaattacattcacctgtgtgtggttgggtaggtgggcgggtgcatggaagtcagagggcagcctatagagtgtgcctttctccttccttgtgggttccaggcatcttaactcaggtgggcaggtttggcagcacgggcctttacccactgagccatcttgccagacccacactggcctctttcatttggcattaatcatttacatctgctttgaatcttttcatggctcagtagctcggttctttctagggcttagcaacgttccactgtttgaatggaccagtgtgtttatccattcacccagtgaaggacatctgtattgtctccaagttcaggcaactataaataaagctgctgtaaaatgtgtgtgtgcatgtgcgtgtgtccgtgtgcgtgtgtgtgtgtgtgtgtgtgtgtgtgtgtgtgtgtgtgtgttacagccacagacatagctcagtggtagagtgtttgcctagtatgcataaggcctaggttcaatactcaagactgaaggaggggtgggtgcgacatatgtcagccctaaccaatagaaccatagaagtgacactaaaatcaaatccctgagtaaataagcagaaaggagaagacaggtggttagtgagcagtgacctacaggaacggtggtaggcaggaggtagtcccccgccagccaggcatcctaatgtgcacagggcctcatcaggaagatagatggtcaggcaagggggaagtactaggagcagccattatacactgaggtcagaggagggtggcatagctggttgaggttgtgtttggaaagggcttaagaaagactctgaggggctcaggagttaagagcactgaccgctcttccaggggtcctgagttcaattcccagtaactacatggtggctcacagccatctgtaatgggatctgatgccctcttctggtgtgtctgaagacagagacagtgtattcacgtacatgaaaaaagaaagactctgagagccagtgtcatttgcttctaatcccagaacttagaagggagacgcaggagggatctccatgaatttgaggccagcctggtctatacagagaattccagaccactagggctacaaaaagtggccctgtctcaaaagaacataaaagatggttcctgagagattgctttgtcaacgcacaaagcaaaaactcatgtgtttaagtttcatgatagccattagtggtggattgcaatggcgtagagtttataaagcgggcatgatggcttactctgggaatctgagggattcctgggaagctgaggcagggggcatgtgagttggaggctgagcctgggctatgtcatagttattgacaacttaacacaagcctacatacacttagggacagggcttctcagctggagaattgccttcatcagctggcctgtggacaagtctgtggagcattttcttgattgctgcttgatgtgggagggcccagactctatctgataaggaaaatgtcaggctaagtgttgagtaccttgtgggagacttcctatgaatgagctgtcaaggctctgccaagacccttggccctaggtctggtcttgacttgagccaatgcctcctgcaggtcctgcttgagaatgtcaggctcagcccacactgagccagagtccattctgggccatgtcgctggagatacaaaagtgcagccatgctggggacagtcggtgccaatgatctgaacggtccagagctggcagtgtccagcagtgtgcaagggtcgcatagccttgaagcagaagtcacaggtgtcacttacaggtgttacaaaatgtgctcatcgctcaaaaaacaggggttcaaatgaattctctctctctttttaaagatttatttatttgtttgtttgtttgtttgtttgtttatttatttatttcatgtatgtgggtaaactgtccctgtcttcagacacaccagaagacaacttcaggtgcccattacagattgtcttagtcagggtttttattcctgcacaaacatcatgaccaagaagcaagttggggaggaaaggatttattcagcttacacttccatactgctgttgatcaccaaaggacttaccaaatttagcttccagcctctcctgcagataaagatggacatctctcatgggagcttatgaagcctcacgcccttcctgaggccagcaatcccagagatgctttctgtctgccctttaccccctgttcacttcaaaatatcacggagcctagggtaggggtagggggtgaagggaccaagccccagcaccggaagtgcactagtcatgggaccacagaacttttcccccccagctatcaggaaggtcacacctatgtcctcacatccgtgcattcccccagagcttacagtgtgcagaggtcatatgcacaaggataccttacaaggctggccagagcctgtttgcctgtggctagcagttgtaaagggtatattgctctttagggacaagcacatgacactggtgtcagtcttgatcaccatgatggtgaccaaataaggcagacaggcagctgcggagcttctgtcttcctctgtctgcttacctttgacacgggacaaaggtgatcaccgtccgttgtttttcccaggtgcttcagaggcagatagaccaagtcatgttcccccaagcaagtaatgaaagggggcgtgggcccctgacatagggctgtgcgctcaacagagttctcgttgacgtttggttttgctggaaacatttcgtcaatttagattactaaattgtttgattcaggcttgccgatgtgaaggcgacttgtgcagtgagacttttggcttctttaaaaacccagttgtggggctggctggtgagatggttcaacgggtaaaatcactgactgctcttctgaaggtcctgagttcaaatcccagcaaccacatggtggctcacaaccatctgtaatgaaatctgatgccctgcgtctgaagacagctacagtgtacttatttataatgataaataaatctttgggcaagagcgagcagggactgagcaagtggagttgaccggaacaagcagtgttgactgcagaagtcctaaattcagttcccaacaaccacttgaaggctcacaacatctgtacagctacagtgtactcatatacattaaataaataaataaataaataaataaataaatattaaaaaataaataaaaatccagttgtgttatataactatactttccgtttaattccaggcacctgatatggggttgcttcacattgtgcacagcagctgactatgatttgtctcatgctctggcaggggtgtaactctgccacctgaagatagtttacttttggaattctgggaactcttgagagggtattaaaagatgccagagccccaagagaggtggaggctgctgctcctggtccctgttgctgtggttcatcaagtggtcatgagcaaaggaagagaagaagaaattggatatcgtgataaagaagattggacttgcccccagggaactcagtgcccctaatcagcaggaagtagtctaaagagttctatgtcccctttcccctctaacctttctctcccacccactgttggggggctggaagggatagagtggtagatagaaaaacccagtaaagtacccagaaagtacagttacagacatctgtggcttcccatctatcagttttacaaggagtcttccaagctgcatttataatgtccttggtcttcctacctgcttcatatgtgtgtatggtgtgtaagtatacatacatgcatgttttacatgtgtgtgaacacacttgtgagtgtgaatacttgtgggtgtctgtacatatggagatccaaggctgatgtcaggaattgccctctatcacacttccgccttgttcactgagtcaaggcttcctggtcaatcccagagcgtgccactgtggctggtcttactcaccagcttgctctggcaacttctgtctttgctttacacggctggaatcacagccaatctccatgtatttatgtggtttctgggactcagctatatacagcatcactttaagaacttaaccatgtcccccacctcctctatctcaggcctctccccatgccccatctgtcccccgcctccccacttatttccatcatttattctgttgtcctgatgagtaagaaaatgttttgagtgctggagagttgactcaatggttaagagcactggctgctcttccagaggtcctgagctcaattcccagcaaccatatggtggctcacaaccatctataatgtgatctgatgttcttttctggcatggaggtgtacataacagatagagtacactcatatacacaaaatctttaaaataatgtttcaaattgtctcttgcatcccccatgttggggatggaacccatgaccagggcgttggacagactagacaactagtttgccagcgcattcccagagctttgtattttcacacagggtttccctgggcagcccagaccaccctgaaacttgcaatcctcctgccttagctttttaattttttgtttttgttttgtttttttttttttgtttttatttttgtttttcaagacagggtttctctgtgtagccctggctgtcctggaactcactttgtagaccaggctggcctcaaacacagaaatccgcctgactctgcctcccaagtgctgggatgttgctgggattaaaggcatgtgccaacaccgtccagctaattaaaaaaaattttttacttatcacatgtaagaacactgtagctgttgtcagacacaccagaagagggcctccaatctcattacagatggttgtgagccaccatgtggttgctgggatttgaactcaggaccttcagaagagcagtcagtgctcttaacctctgagccatctctctggctcctgccttagcttcttgaatgctggatttgcaggtatgtgccacaacacctggtttagaatggtagatatttgcaaaatgctttttctgattcagttgagatgatcatgggtcagatcttagcatgtttaaggaataaaataggacttgagctcctgtggggtttatcttcgttctattagtgtggtgtgttgacggattctgtttcagctctgggactctgcagacttgggataactcctcctgggtcatggtgcacaatccttaaaagctgcagtgaggggaagcgggtggggcaggaaaaaaactgcagtggggggctggagaaatggctcagcggttaagagcactgactgctcttccagaggtcctgagttcaattcccagcaaccacatggtggctcacaatcacctgtaatgggatctgatgccctcttctggtgtgtctgaagacagctacagtgtactcacatacataaaataaataaatcttaaaaaaaaaaatactgcagtgggattttgctgtcttttctctgagaagtttttttttttaaagacttgtttatttttattttatgtgttttgcttgtgtgtgtgtatgtgtgccacatgtgttcaggtgccttctgaggctagaagaggttgttggatgccctgaaactggagttacagacagttgtgagctgccatgtgagtgctgggagcaaaggccctgtcctctggaagagcagctggtggcttactgctgagccatctctccagcccttgctgagaatttttctacatttacatttaaaaggagacttttttaaaaatgtacttattcatgtataatataagtgtctgcatgcacacctgtgagccagagagggaactggaccctcttattgttggttgtgagccaccatgtggttgctgagacctctagaagaaaaactagtggtcttaacagctaagccatctctccagttccttaattgggtatttttttaaaaaagatttatttattttatttatatgagtatactgtacctgtctttagatacaccagaagagggcattggatcccattacagatggtcgcaagccactatgtggattttgagaactgaactcaggacctctggaagagcagtcagtgctcttaacccctgagccatctctccagcccttaatagttttgttgttgttgttttgtttttgttttttgagacagggtttctctgtgtagccctggctgtcctggaactcactctgtagaccaggctggcctccaactcagaaaaccgcctgcctctacctcccaagtgctgggattaaaggcgtgtgccaccactgcccggttaaatagggtattttaaaaaagaattttctttcttgtgatgttattgctgttggattttgagagttcttttcatgttgaagtttttgtatgtacaagatgcttgctggatatacagcttgctaatcctgccttccatcctgtggctaggagattccaatattgacaaaattcagcttgctcgctttgtcatttgtctaatcccaggtcacaagaattttctcccatctttttttctatagttttggttttgttttttgttttttcccccaaagcagggtttctctgtgtagtcctgactatcctggaatctattctgtagaccatgctagcctggtactcacagagtaccatctgcttctgcctcctgaatgctgggattgaaggcatatgcaccaccactgccactatagtttttagctttgagttttacctttaaatctaattgcagtctaggaatgtagctgagttggtggaaagcttgcctagaatactcaaagccccaggttcaatctccagcaccacggtacagacaattgtaatccaggactcaggaagcaaaggcagggggatcacaagttcaaggtcagcctcacctacatagtgacttggaggtcggtcggcctggcctggggagatggtttagtagagtgcttgtcagtactttatgtgattctgagttcaatcccaagaatccacagacaaaagcagggcccagcagcacatatttgtaattccagttgggaagattgctctttgctgcccagccagtctagcctatccagtaaactccaggttcaatcaaacacccttcctcaaaaaaaaaaaaataaggtggagagcaatagggagacatctgatgctgacctctaaactccatgtgtacacacacatccaattaatttgaaattttttatgattgtttttgtctgtacagggtatcctggagtccagttagcttcagactagctatatatccaagaacgacctcaaattcctaatcctcctggacaaactgcccctgtgctggaattacaagtgtgcactaacacacccacgtttctttcattgttttaaaaacaggatatcactttgcagtctagactagacttaaactcacattagttctcctacctcagtctctccagtttgctgtcaatcaccccctatctaataagtgccgggtctggggatcaccccacaaaccactcaggcactgatctcaggcaaatagggatggtttattggatgccacaccacaagatttaccaatcaggtcttgacattgagttaagacccgatagggcttttaagcctaaaaatccataaacatctgtgccaagttattccaccaatcaggatttagggatagggaatttccttaggaacctgtctttgtggtacatttatcctgctcccattggtcagagtatttaatggtggcgggggacttgctttgcctaacattcatgttgtaacttgtcaaccaggatgtcagttaaccatgtacatgtctctttctgccaagcgggatgtgagttcccagggaggtcttgggaacttaagttttactagaccactattcaaaatggaagtctaatttcaaatagcttctatactggtgcaagaatctctcttatgatggggtctatcccaggtacatttaaaaaaatgtatttattattatatttaagtacactgtagctctcttcagacacaccagaagagggcatcagatctcattacgtatggttgtgagccaccatgtggttgctgggatttgaactcaggacctctggaagagcagttagtgctcttaaccactgagtcatctccccagccccccggggacttataaaggcaagaaaccttaaaagctcatacataggtgtaggaagtgctgctgggtgattggtttgggtccaaacttatgtggctaaccatagaaagcagttttaatggattctattgtgattgttttccaagaacaccaaagcacaggacattctagtaacagcagttaacgcacctgagaaagtttccttaggacattagctgttacacacacaaatgcagaaaatggcgggctagacaggtaacatttacctaggtcttaataatgttttacccaggccttaacattttacttaggacttatcacaagttgtatgtgggcaaagctgtttgtttttaaattttttattgttattggtgtgtgtatgcagaggagggagggggcaatgacacacacacacacacacacacacacattggtgtacacttgaatgtgagcgcacaaatgccacaaagctcatgcagaatctataaggcaacttttcagtcatagactctgaggctcaaactcacgtcctgtgttgagtcactggggcccaaaggaggcttcagcagggaggagagtctgcctgttctctatatcaacctgctaaggatgggttagagggatttaggtaccttagtcagggcacatttggatacctataagcatgtatgtgttcttagagggctggcccaattccctcaagcattttgtatttaactccccctttcctgaaaggaccctctgcggcttgccaggaggtgaggagacgggatatacattagtcagggagtgattttatcactgtactgaaaattctggaatgttggtgaaattacatgagtatttttacttaaaaaaaaaacaaacagaaatacaagaaaaggttttcgttcgaatcctaggtgtaggatatgggggtgctttgtactttccgcagcagctgactatgatttgcctcgtgctctagcagaggcatggttttgccagctgcagatagtttctgcaattgtgtgatgtttggaattctgggaacttttcagttatataaatgccagggccccgagaggtggggtgtggtggttgatgtttgggggagccggggttggatgctgtctgttagtagtctagtagtcatgctcaaagaagaaataaagggatctctcccacctcccctctctctttcttttcctcccatctagtgatagggggtgtaacagggggaggggagataaagggtgggagagagaagaacccacaaagtagcaaataccaactacagtctacctccacttgaagatagccctttagtcacaggactccaggtaatctctctcagcattagtaagcccatatacaaaaattctttcatcagcatagtccccaggtactttcactgcaagggctcccaatcttccagggactgtccttgctgctgtctcttctcctgtcctgattctacagtgtcctctcaacctgtgctgtcctgttccagcctaggttcctgtgctggcacagagaaaagtatggcctccagatgtggcttgggaaaagagcccccatgtgagagttctctcagctcagagagtccttgtcaggtaaccctggtagtcagcgtgccatacagtatcaaatgcaaggaagctgagggtcaagataggaagtggggtaaccactcagcggcccacagaggatggttaaggcttaaggctgaaccagacatggtggtccacactctttaattccagcactccggagacagaggggaggccgaaggatctgagttcagtgctagcctgctgtacagaataagttctaggacatacgcagggaaaccctgccttgaaaagtcaacaacaacaataataaaattaataataatatattagataaaaagttaagactgggccttggaggtgccaattatcaatttcaccatggtccgcttaagcactgactgatggagacttgggaagagagtggtgagaaaagtagggccagccaaggcctggatcccaagagttgctgcacatctgcccacagagaatgagcttggtgtgctgctcagtattgctaagcccagaaccgttagtgaaagaggcgaggagcctttaacctgttccagaaccagagctgatggtttcccacgtgggaaggaccccagtgcaggagtatagataggttctccacatcctccaaggtatcttggagagccgcttttgacaggtaatttagtggcctgtctcctggccaggatgggatggctggctctgacgaatctggtccagacaacctgcttttctacctaggtttctggaagcacaaactagccccgatgaggggacacatcagccgctgcttagcctttttatgccagtcacttcgctcatttctcttgaattgaagcatttctccctctgccaatttcctagagttcagaaattcaagccggggcggggcggggctggacgcgctgggggcgggattccgggtagcccctgcctgcaaatccccaggctcagcgcctcccggagcgggttcagcagtggcaggccggccataacttcgtatagcatacattatacgaagttatgtttaaacaccctgcaggaggggcccacaagcttgatatcgaattcatatgtctagattagataaaagtaaagtgattaacagcgcattagagctgcttaatgaggtcggaatcgaaggtttaacaacccgtaaactcgcccagaagctaggtgtagagcagcctacattgtattggcatgtaaaaaataagcgggctttgctcgacgccttagccattgagatgttagataggcaccatactcacttttgccctttagaaggggaaagctggcaagattttttacgtaataacgctaaaagttttagatgtgctttactaagtcatcgcgatggagcaaaagtacatttaggtacacggcctacagaaaaacagtatgaaactctcgaaaatcaattagcctttttatgccaacaaggtttttcactagagaatgcattatatgcactcagcgctgtggggcattttactttaggttgcgtattggaagatcaagagcatcaagtcgctaaagaagaaagggaaacacctactactgatagtatgccgccattattacgacaagctatcgaattatttgatcaccaaggtgcagagccagccttcttattcggccttgaattgatcatatgcggattagaaaaacaacttaaatgtgaaagtgggtccgcgtacagccgcgcgcgtacgaaaaacaattacgggtctaccatcgagggcctgctcgatctcccggacgacgacgcccccgaagaggcggggctggcggctccgcgcctgtcctttctccccgcgggacacacgcgcagactgtcgacggcccccccgaccgatgtcagcctgggggacgagctccacttagacggcgaggacgtggcgatggcgcatgccgacgcgctagacgatttcgatctggacatgttgggggacggggattccccgggtccgggatttaccccccacgactccgccccctacggcgctctggatatggccgacttcgagtttgagcagatgtttaccgatgcccttggaattgacgagtacggtgggtagggggcgcgaggatccactagtacgcgatcgctaataacttcgtatagcatacattatacgaagttatatttggccgcatttaaatcccgggatccaccggtcgccaccatggtgagcaagggcgaggagctgttcaccggggtggtgcccatcctggtcgagctggacggcgacgtaaacggccacaagttcagcgtgtccggcgagggcgagggcgatgccacctacggcaagctgaccctgaagttcatctgcaccaccggcaagctgcccgtgccctggcccaccctcgtgaccaccctgacctacggcgtgcagtgcttcagccgctaccccgaccacatgaagcagcacgacttcttcaagtccgccatgcccgaaggctacgtccaggagcgcaccatcttcttcaaggacgacggcaactacaagacccgcgccgaggtgaagttcgagggcgacaccctggtgaaccgcatcgagctgaagggcatcgacttcaaggaggacggcaacatcctggggcacaagctggagtacaactacaacagccacaacgtctatatcatggccgacaagcagaagaacggcatcaaggtgaacttcaagatccgccacaacatcgaggacggcagcgtgcagctcgccgaccactaccagcagaacacccccatcggcgacggccccgtgctgctgcccgacaaccactacctgagcacccagtccgccctgagcaaagaccccaacgagaagcgcgatcacatggtcctgctggagttcgtgaccgccgccgggatcactctcggcatggacgagctgtacaagtaaagcggccctagagctcgctgatcagcctcgactgtgccttctagttgccagccatctgttgtttgcccctcccccgtgccttccttgaccctggaaggtgccactcccactgtcctttcctaataaaatgaggaaattgcatcgcattgtctgagtaggtgtcattctattctggggggtggggtggggcaggacagcaagggggaggattgggaagacaatagcaggcatgctggggatgcggtgggctctatggcttctgaggcggaaagaaccagctggggctcgacgactaggttaattaaggccggccaggcctctagtgcggtaaatagcaataaattggccttttttatcggcaagctcttttaggtttttcgcatgtattgcgatatgcataaaccagccattgagtaagtttttaagcacatcatcatcataagctttaagttggttctcttggatcaatttgctgacaatggcgtttaccttaccagtaatgtattcaaggctaattttttcaagttcattccaaccaatgataggcatcacttcttggatagggataaggtttttattattatcaataatataatcaagataatgttcaaatatactttctaaggcagaccaaccatttgttaaatcagtttttgttgtgatgtaggcatcaatcataattaattgctgcttataacaggcactgagtaattgttttttatttttaaagtgatgataaaaggcacctttggtcaccaacgcttttcccgagatcctctacgccggacgcatcgtggccggcatcaccggcgccacaggtgcggttgctggcgcctatatcgccgacatcaccgatggggaagatcgggctcgccacttcgggctcatgagcgcttgtttcggcgtgggtatggtggcaggccccgtggccgggggactgttgggcgccatctccttgctgcctcgcgcgtttcggtgatgacggtgaaaacctctgacacatgcagctcccggagacggtcacagcttgtctgtaagcggatgccgggagcagacaagcccgtcagggcgcgtcagcgggtgttggcgggtgtcggggcgcagccatgacccagtcacgtagcgatagcggagtgtatactggcttaactatgcggcatcagagcagattgtactgagagtgcaccataaatcaatctaaagtatatatgagtaaacttggtctgacagttaccaatgcttaatcagtgaggcacctatctcagcgatctgtctatttcgttcatccatagttgcctgactccccgtcgtgtagataactacgatacgggagggcttaccatctggccccagtgctgcaatgataccgcgagacccacgctcaccggctccagatttatcagcaataaaccagccagccggaagggccgagcgcagaagtggtcctgcaactttatccgcctccatccagtctattaattgttgccgggaagctagagtaagtagttcgccagttaatagtttgcgcaacgttgttgccattgctgcaggcatcgtggtgtcacgctcgtcgtttggtatggcttcattcagctccggttcccaacgatcaaggcgagttacatgatcccccatgttgtgcaaaaaagcggttagctccttcggtcctccgatcgttgtcagaagtaagttggccgcagtgttatcactcatggttatggcagcactgcataattctcttactgtcatgccatccgtaagatgcttttctgtgactggtgagtactcaaccaagtcattctgagaatagtgtatgcggcgaccgagttgctcttgcccggcgtcaatacgggataataccgcgccacatagcagaactttaaaagtgctcatcattggaaaacgttcttcggggcgaaaactctcaaggatcttaccgctgttgagatccagttcgatgtaacccactcgtgcacccaactgatcttcagcatcttttactttcaccagcgtttctgggtgagcaaaaacaggaaggcaaaatgccgcaaaaaagggaataagggcgacacggaaatgttgaatactcatactcttcctttttcaatattattgaagcatttatcagggttattgtctcatgagcggatacatatttgaatgtatttagaaaaataaacaaataggggttccgcgcacatttccccgaaaagtgccacctgacgtctaagaaaccattattatcatgacattaacctataaaaataggcgtatcacgaggccctttcgtcttcaagaattcccatgtcagccgttaagtgttcctgtgtcactcaaaattgctttgagaggctctaagggcttctcagtgcgttacatccctggcttgttgtccacaaccgttaaaccttaaaagctttaaaagccttatatattcttttttttcttataaaacttaaaaccttagaggctatttaagttgctgatttatattaattttattgttcaaacatgagagcttagtacgtgaaacatgagagcttagtacgttagccatgagagcttagtacgttagccatgagggtttagttcgttaaacatgagagcttagtacgttaaacatgagagcttagtacgtgaaacatgagagcttagtacgtactatcaacaggttgaactgctgaaacatgagagcttagtacgttagccatgagagcttagtacgttagccatgagggtttagttcgttaaacatgagagcttagtacgttaaacatgagagcttagtacgtgaaacatgagagcttagtacgtactatcaacaggttgaactgctgatcttcagatcctctacgccggacgcatcgtggccggatcgcggcccggcgcggtcgacgatcatcctgttacggaatattacattgcaacatttacgcgcaaaaactaatccgcattcttattgcggattagttttttcttagctaatagcacaattttcatactattttttggcattctggatgtctgaaagaagattttgtgccaggtcgataaagtttccatcagaaacaaaatttccgtttagttaatttaaatataaggaaatcatataaatagattaaaattgctgtaaatatcatcacgtctctatggaaatatgacggtgttcacaaagttccttaaattttacttttggttacatattttttctttttgaaaccaaatctttatctttgtagcactttcacggtagcgaaacgttagtttgaatggaaagatgcctgcagacacataaagacaccaaactctcatcaatagttccgtaaatttttattgacagaacttattgacggcagtggcaggtgtcataaaaaaaaccatgagggtaataaatctagaggatcgatcctttttaacccatcacatatacctgccgttcactattatttagtgaaatgagatattatgatattttctgaattgtgattaaaaaggcaactttatgcccatgcaacagaaactataaaaaatacagagaatgaaaagaaacagatagattttttagttctttaggcccgtagtctgcaaatccttttatgattttctatcaaacaaaagaggaaaatagaccagttgcaatccaaacgagagtctaatagaatgaggtcgaaaagtaaatcgcgcgggtttgttactgataaagcaggcaagacctaaaatgtgtaaagggcaaagtgtatactttggcgtcaccccttacatattttaggtctttttttattgtgcgtaactaacttgccatcttcaaacaggagggccggaagaagcagaccgctaacacagtacataaaaaaggagacatgaacgatgaacatcaaaaagtttgcaaaacaagcaacagtattaacctttactaccgcactgctggcaggaggcgcaactcaagcgtttgcgaaagaaacgaaccaaaagccatataaggaaacatacggcatttcccatattacacgccatgatatgctgcaaatccctgaacagcaaaaaaatgaaaaatatcaagttcctgaattcgattcgtccacaattaaaaatatctcttctgcaaaaggcctggacgtttgggacagctggccattacaaaacgctgacggcactgtcgcaaactatcacggctaccacatcgtctttgcattagccggagatcctaaaaatgcggatgacacatcgatttacatgttctatcaaaaagtcggcgaaacttctattgacagctggaaaaacgctggccgcgtctttaaagacagcgacaaattcgatgcaaatgattctatcctaaaagaccaaacacaagaatggtcaggttcagccacatttacatctgacggaaaaatccgtttattctacactgatttctccggtaaacattacggcaaacaaacactgacaactgcacaagttaacgtatcagcatcagacagctctttgaacatcaacggtgtagaggattataaatcaatctttgacggtgacggaaaaacgtatcaaaatgtacagcagttcatcgatgaaggcaactacagctcaggcgacaaccatacgctgagagatcctcactacgtagaagataaaggccacaaatacttagtatttgaagcaaacactggaactgaagatggctaccaaggcgaagaatctttatttaacaaagcatactatggcaaaagcacatcattcttccgtcaagaaagtcaaaaacttctgcaaagcgataaaaaacgcacggctgagttagcaaacggcgctctcggtatgattgagctaaacgatgattacacactgaaaaaagtgatgaaaccgctgattgcatctaacacagtaacagatgaaattgaacgcgcgaacgtctttaaaatgaacggcaaatggtatctgttcactgactcccgcggatcaaaaatgacgattgacggcattacgtctaacgatatttacatgcttggttatgtttctaattctttaactggcccatacaagccgctgaacaaaactggccttgtgttaaaaatggatcttgatcctaacgatgtaacctttacttactcacacttcgctgtacctcaagcgaaaggaaacaatgtcgtgattacaagctatatgacaaacagaggattctacgcagacaaacaatcaacgtttgcgccaagcttcctgctgaacatcaaaggcaagaaaacatctgttgtcaaagacagcatccttgaacaaggacaattaacagttaacaaataaaaacgcaaaagaaaatgccgatgggggatcctgtcggcaccgtctggtttgcttttgccactgcccgcggtgaaggcattacccggcgggaatgcttcagcggcgaccgtgatgcggtgcgtcgtcaggctactgcgtatgcattgcagaccttgtggcaacaatttctacaaaacacttgatactgtatgagcatacagtataattgcttcaacagaacatattgactatccggtattacccggcatgacaggagtaaaaatggctatcgacgaaaacaaacagaaagcgttggcggcagcactgggccagattgagaaacaatttggtaaaggctccatcatgcgcctgggtgaagaccgttccatggatgtggaaaccatctctaccggttcgctttcactggatatcgcgcttggggcaggtggtctgccgatgggccgtatcgtcgaaatctacggaccggaatcttccggtaaaaccacgctgacgctgcaggtgatcgccgcagcgcagggtgaaggtaaaacctgtgcgtttatcgatgctgaacacgcgctggacccaatcttacgcacgtaaactgggcgtcgatatcgacaacctgctgtgctcccagccggacaccggcgagcaggcactggaaatctgtgacgccctggcgcgttctggcgcagtagacgttatcgtcgttgactccgtggcggcactgacgccgaaagcggaaatcgaaggcgaaatcggcgactctcacatgggccttgcggcacgtatgatgagccaggcgatgcgtaagctggcgggtaacctgaagcagtccaacacgctgctgatcttcatcaaccagatccgtatgaaaattggtgtgatgttcggtaacccggaaaccactaccggtggtaacgcgctgaaattctacgcctctgttcgtctcgacatccgtcgtatcggcgcggtgaaagagggcgaaaacgtggtgggtagcgaaacccgcgtgaaagtggtgaagaacaaaatcgctgcgccgtttaaacaggctgaattccagatcctctacggcgaaggtatcaacttctacggcgaactggttgacctgggcgtaaaagagaagctgatcgagaaagcaggcgcgtggtacagctacaaaggtgagaagatcggtcagggtaaagcgaatgcgactgcctggctgaaagataacccggaaaccgcgaaagagatcgagaagaaagtacgtgagttgctgctgagcaacccgaactcaacgccggatttctctgtagatgatagcgaaggcgtagcagaaactaacgaagatttttaatcgtcttgtttgatacnnaagggtcgcatctgcggcccttttgcttttttaagttgtaaggatatgccatgacagaatttcatcccgtcggatcgatccactagaggcgcgccgcactgactgatggagacttgggaagagagatggtgagaaaagtagggccagccaaggcctggatcccaagagttgctgcacatctgcccacagagaatgagcttggtgtgctgctcagtattgctaagcccagaaccgttagtgaaagaggcgaggagcctttaacctgttccagaaccagagctgatggtttcccacgtgggaaggaccccagtgcaggagtatagataggttctccacatcctccaaggtatcttggagagccgcttttgacaggtaatttagtggcctgtctcctggccaggatgggatggctggctctgacgaatctggtccagacaacctgcttttctacctaggtttctggaagcacaaactagccccgatgaggggacacatcagccgctgcttagcctttttatgccagtcacttcgctcatttctcttgaattgaagcatttctccctctgccaatttcctagagttcagaaattcaagccggggcggggcggggctggacgcgctgggggcgggattccgggtagcccctgcctgcaaatccccaggctcagcgcctcccggagcgggttcagcagtggcaccatggggaacagcagcgctactgaggacggtgggctgttggccgggcgtgggccagaatccctggggactggcgccgggcttgggggcgcgggcgcggcggcgctggtggggggcgtgctgctcatcggcttggtgttggcagggaactcgctcgtgtgcgtgagcgtggcctccgagcgcacgctgcagacacccaccaactacttcatcgtgagcctggctgctgccgacctcctcctcgcggtgctggtgctgcctctctttgtctactccgaggtgagcctcggtgcgctcttcccctacctccactgctcccagccccccagccccagcgcagtttcgcgcttggaccctcagccaccttgagccagggtgtttgcagggacgtcaggtctcctcactcctgactatccactctctcccgctcttcagaatctttcgcctacttttcctcttgtccgtcaccctaccatcctctggattccttcctactctgtctgagagctacctacccagagaggactcgtgtccctaaaaccaagaatcgcagaaaattgtccttcctatttaagccctggcttccactgcagaaatgctgcatcccccagcctgtggcaaaaaacagctagctagacaggcgaaagtgcagacacgcagcatcagcatcactaccgatgactactgccttttgggaacacacacacacacacacacacacacacacacacacacacacacacaccccagcctgtgccagctcactctcacccttcggaagaagcccaaagcctgcagccacccagctcccaggagctcggagcagcaaagggtgaaggcagagaggcctgggcaggatactgaacctgaggggccgctaaagggagtgggttcaggaccttttggagactcctggaacacagacaccccagatcaggtctggctcgtaggtgggtctgctgtggttactggcaattcttatctgcccacggtttgggcagggtggggtggggtgaatggtatttctaaagaagaccctgagttctggagctggagcagaggccagtggccacacttgaccccaggtcctccccaaggcacagacgtcactgtgatgattcttaagctcataatcatcccaaatcagtgtgaagggatttggggacggctggtttgagacggctgtgtgctcctttgcccttgaaaaagaacactccgtgcagcagattcacagacagcccggcgaggtctttgtatttttaggacacatttgtcctcaggacaattgccatgtgtccagcaagtgaagagacctatccaaagccccacagcagtgacagttcatgcagggaggataactcgagtcttggaggtgggtaggatttgtgtttagggggccaggcttaagaatttagggcctcctctcccctagatgttatcaacccccctgggtcttacccaagcttctcacataaccaaagaagacctaagtcaagaggcaggtctgtttgcacgttctgtctccaacacatgtctcaggctcacatcgggcttgtatgcccccttccctctaatacacagccctcgattcccctcaacaagagtgggggtcagcaagtccgcggctcaaaggtcaggcaggtcttgtgtttcatttctgcaaactctgcgtggccaggtccagggtggcgtgtggctcctgagcccccgtctctgtgacacgctcatggccatggacgtcatgctgtgcaccgcctccatcttcaacctgtgcgccatcagcgtggacaggtgggtaccccggacgacccctctcccagtcccacctccgggttagccgccccactcggcagcttcaccgctcctgtgctcctctaggttcgtggccgtgaccgtgccgctgcgctacaaccagcagggtcagtgccagctgctgctcatcgccgccacgtggctgctgtccgccgcggtggcttcgccagtggtgtgtggcctcaatgatgtgcccggccgcgatccggccgtgtgctgcctggagaaccgagactatgtggtctactcgtccgtctgctccttcttcctgccctgtccgctcatgctactgctttactgggccactttccgcggcctgcggcgctgggaggcagcccggcacaccaaacttcacagccgcgcgccgcgccgacccagcggccccggcccgccggtgtcggaccctactcagggtcccttcttcccagactgcccacctcccttacccagcctccggacgagccccagcgactccagcaggccggagtcagagctctctcagagaccctgcagccccgggtgtctgctcgctgatgcagctctcccgcaacctcctgagccgtcttcccgcagaaggagaggcgccaagatcacgggaagggagcgcaaggcaatgagagtcctgccggtggtagtcggtgggttcctgtcctgggacaagagttgatagagggagggagggagggagggaggggtcccgggagctgaggccggggacagggggagggtccaggttggaagggtgaaaagtggggggtcctgggtgagggacctggagtgcgggtgtacaggctcacgccgcccatccccaggggccttcctggtgtgttggacgcctttcttcgtggtgcacatcacgcgggcgctgtgtccggcttgcttcgtgtctccgcgcctggtcagtgccgtcacctggctaggctatgtcaacagtgccctcaaccccatcatctacaccatcttcaacgcggagtttcgaagtgtcttccgcaagactctccgtctccgctgctgaaaggatgtcctgcagaggtcaaggagttccaagactgtgtgcagagtgcgctggcgcgcattctttcagtctgattaaacgaaatcttttctaaccacttatgaaggctgggggttgggaaaaagaaaagaaaagaggaagctcttttgtctggatgatgcccccccccgcccctgccccagttaacttctgtctttgaggatgctcagttcagctccaggaggcaggaggcttctgaagtctctgccccagaaaagtaggggaactactacatctgccttagtttcccctcactatgaaaagtgaccaagtgtcctagaagaggagctagaggaatttcctgaggctgctgggtcctcaggatcctatccaggccaactcttgctccttggagagctagggagggagggctctgctgtcattgaaggggtggtgggtatcctattttggaaactttctgagtacagcacacatagctttctaccagcctttctccaaaaggtgcctgaaactcagcactgaccaagttcctcaaggtgccctctggaagggagccctccactcagacccacccagtctgcctttatttaccctatgtatgtccagcatctgggtatctatgtgaccaggcggcaaggttcaaggctggactaaggggcccaagcagccaaggtgttggggctccttggccaaggcccagtcctacaagaagaggtgattcctgatagggactgcctaccctaacacttttccctcccccgtcctgttatgggagagatgtgactcagggctgctgtgggcaggagtgcagggggtctgtgggggggtggtcctaggctggggtcccacatcaaaggcagctggcacaatgtgtcacactctgttctcaatattgaggaataatgagctgtgagtgctacagtagtagcacccccccccccacacacacacattttatactagctctggttgaacagggacaattccccagcacagagggaaattgccataaggcctcactgggctctagatgctcatgcccctgctgtgtcatctgttgaccttccaggaccagcatgctcctaaggggccaatggggtcttgggttcatgtctgtccacatagagtctagtattagtggaactgaggctcccttaagttttgcccctggagaccctaggataccaaatgtgcctggcctttgctgatttccactgaactgaaaggctctacagatacaaaggtaaggttgaaactcatgtgagggggacagaagtctctggaagcttgggaaactaagccccaagggcccatgcccctagaccttttgagtttcttccttagaggaaagggaaacaataaattggatgaattccaggtggcatgtgtcactcatccattgctcttgggtggtcactaccccaaaacccatcttggtgttctggggccctcatttggtgacactccttgggggtagatgccatggatgcccctgcaggctgtcccatagggttgggcatttccttgatgactttgccattttggtcttgttttcctgccactgttagtattaaactgagctgtataatctcagctaactgcatgcatggtctgggtggctagttacagctgagggcttctctgccaccagaaaacaacggcaaggctcctcttgctcaaagggttggagaggcccaaggcttgattccaattaaataggatggtcacggagaccttattcagtagaaaggcctcaggtgcccgactcccttttaaggcagggaccccacagtcttggcatcttcttactcacatgcatgcccctccctcagctacccttgtgattcaccttcagggaatctcagggctgggtgcaggaccttctggcagaaggaagaacggttctctgcccagtgtggggttagccataatttcttacacataccagagtgtgaagctggaagatacttttatctcacagggtctgttttagaagtaggtatgagaattggtgagtctataaacataaactataaaagttcatcctaaacttcaacttgaagcttccctgcactagtaggggatatgcagggtctccctacttccactagagaaatagattgaaaattcctcaggggtcgcaggctggcctgcactatgtgctggccacgacagcagtgaaggtaggtcaacaagaggattgctggaggcctacatccccacagtagaacacgtggcagtgtatattatactcacacaatcaggacttagcagaaaccttctggtcatctgaatataaaatggcttgacaacattcaggtatggggtgggagttttatttacatgtttattaacagataagacaggtatgtacacgtggcatagggcaccccaagggtagtgggacactcatgatccagggatgaaagagcaccgtgataggctgagggccctgggctgtagcagagtgccccattctgaaagctgccagcgttccttggtctctggaaggagcttgtttccaagggcacaatctgttaataacttgtccggcaagtttcccatggcccctcttctcagcagcccccacagtcatcagagggcctaagcctgcgatggcttcacagcagagctcaaggagaagcctggctcaaacagcaactttttctatcacactttcttcaacatggacgtcatcagcctggacagtgacagacgctgactggccacacacatgctgatggtctttccagtcctagaagaaaagacagccatgttagcaggaaggacatcagggacccactgcggaccaagcagcacatcacctgtggatgggctgggctggggcgctgggaggagccctggatttcacactaagggggctgtttgtgtgctgttagtcagggaacgtttccatcagggctggtgtgtcaaccactgaagctgtagagatcagataacaagacacgcatgtaacaagactgaatatgttcagacagggtctctctatcatgtagccctagttgtcctggaactaactagtagatcaggctggtctcgaactcacagagatgttcatgcctctgcctcctgagggctgggattagaggtatgtgccaccgtactcagctgctgttagaattacaggcacagtggctcatgcctgtaatcccagcatggggggaattgaaacaggagagttgccaggagtttgataacagcctaggctaacagtaaaaacaaatacatttctgtgtgatactgccacccaccgtgatattcacaatgagtgtgaggatgatcctatctgcaggcacaggcacacatgcacacagacagcccataagaagcacattctgaaggcaagtggtgcctcaggataggccagcctcactgtcatgataaaaaaaaactgccccaaccaggtggcactgcacaggcctttaatcccagcacttgggaaggagaggccagcctggtctacagagtaagttccaggacagccagggctacacagagaaaccctgtctcaaaaaaccaaaaaaaaaaaaaaaaaaaaaaaaaaaaaaaaaaaaagccagatttaacaatcagtcttggtagtagaaaaatggctcagtggttaagaggacctagactcagttcccagacccacctggtggctcacaactgcctgtaactccagttccagggattcaagactctcctctgacctccatgggcaccacccacaccaatccccctccctccccgccagctacacttcagccagcactcaggaggcagaggcaggctgatatatgagtttggggtcaaggcctgccagctctacatagtgaagagttggggaaatggctggagggtggtggtgaagtgtgctcttgttgtgacatcatgaggatcagagtgtggatcatagcatttatatagcaggccaggcattcagtatatgcccgcaaccccagcttcaagagaagcagagacaggaggaggacagctgggcttgctggcttccagttaaccaaggaagagttcaggaagagactatcttaaaggaataggtagatattaaagaaacacacctgatgccctctttaggtctctcagcaggcaccagtacacaagggtacatacacacacacacactttttgttgctggttttgtttttttttgagacagggtctctaggtagctctggctagcctgggacttgctatgtagaccaggctggacttgaactcatagagatcggcttcctaaatgctgggattaaaggtgtgtgccaccacacttggtaccaacatcatgtacaatgatttttttttttaaatcccattaagaaaaagtctctgtgactgaaaatgaccctggctcatagatgcaaacagtgatgtctttggcttgcttgaaaatgttcagccccggccaaagagcaggtgctgactcttggcaggacgttctcagagaaaccagccattctggagacttcagattctccacagcagtgaagcagaaaggctggcaccatgatggcaaacagacgtaaccatgctagagtccttggcaaagtcaggtccggttatatgggtaacaagcagcacggttgtggttgagcgtgcaagctattcctaaccttcccagctgatagcttccggtgcacaatgcaggcgcctgcacagttcatgtgcatagtctgcagatttagacacatcctttcctgtatatgccaacccatataagtaaaaccttaaagtttacatcccctttgcaaatgttcttagttcagggatggttttgaaagtctcaaacctcagcacttggagtgttgtggcaagaagtcactagttaaaggccagcctgagccgggcatggtggcacacacctttaatcccagcactcgggaggcagaggcaggcggatttctgagttcgaggtcagcctggtctacaaagtgagttccaggacagccaggctacacagagaaaccctgtcccccttcaaaaaaatccaccccccccaaaaaaaaagagaagatgaacttctgattttgctccccaaatctctggcctcttggaggcaagcacagctctagagatgtccagaggacataggccatggcaccccctaagccctggaggcgatggctcccgaggattcaccagggcagacaggactgccaggttccatcagggtggaacgtggcactttccttgtgacatgtgaagctctctgagacctgcagacctcaggctggggcacatgtctacttcatgagctgctcttcgtgcctgtatcctatcgccacacttctgttcgctggccaggtttcatcaagccaccagggagcaggtcttgagggaggttctgtcagcagatatggcttgaacctgcggtggctattaaggtagccgtacaaaggaactcttaaggctcctacaactatggactaggcacaaaagaagcaatcaatttaatagggcacaaggaacagaaacgactccatggagagtgttgggaggccacagcagctgccccaacccagacccagcttcatggcactgcctaggataaccataggctgaagactttggaaaaaataaaaatgatgaggttactagctgttccaaagtgctcttgggaagggtaaaagtgttaagcatatgatggtctaagtgttcaactgacagcgtagtagtgccctaggacagtacagatgcagcccaacaccataaacttattaaaaaatgtcatgagatttgttttgccctccccaatacttgattatttcgttcttgagtgtgcactttgtagatgacaatgtcatgtcacaatatcaaaaggttagacatgcaaacaactctcttcaatgctaggggtggtagcaaacctcagatccaagcaccagagaaaaggagccagcagaaggttcgagggcagtccaggctacataaaaccctgtttcaaaaaaaaggggggggggcagggactggagctctggctcaggtggcagagtgcctgtctgatttaaggttatgcttgactatatatggagttctacagcagcctgatatatatgaaaccctgtctcaaagacgaaaagggccaggcggcggcggtggtggtggcagctcatgcctttaatcccagcacttgggaggcaaaggcaggcggatttctgagtttgaggccagcctggtctacaaagtaaattccaggacagccagggttgtgtagaaaaaccttgtttcaaacaaacaaacaaacaaacaaacaaaacaaagtttaaaaaaaaagaagaaaagaaaaaagggaaaaagctctctttgctgctttaagagccaatgattaataggaacaatgacactggatgaccattcttgcaatgttctgtgaggcctgctgggccaggccatggtgagaggccctcagaacatggactccttgccagtggactttgcccaatgcaggccttacatgggcacatagatgctcacgtgctttcatctcacagatccagctgggagcctgcagaaatgggaaggaagaacccaaacccagcagaggatccagcaggcagctctaagcagccactgctctgagcactacccagaccataaccctgaaggcagcgttctgccccgcaggtgcttggagtgagtccacctgcctaggcacctatccaggacactagagtgggaaaggctgaggtgatgcaggcatgtgagcaggcacgctaccttgcgctggcagaacgtagagcagtagttaaccttgtggcagccggtacactcactcatggcctcccggccgcagttgacacatgactgctgcaagaaggacaaacaagtgtcagcgtcacagcaggcaccaggctccatggcaggcacccatgaccaacagaaacactaagtacagctgtggactgtgtccgtcccagggttgaccagttgtacagaaccggcttctctttatcggagtttactctgtacaatgaaacagagtattagtgtatagaaagtccaacttgggagaagttctcaacttttcagcacaccttctgagtgcttgaggtcccagcccgcagacacgcgggagaccagcactgcgaactctgagttgcttttagtgtgtcagctctgctatggaatctgggtctaatgtccccagtggtcttagcatccccaaggtgtccccagggggctcttcagagtcacttcattgaaagagcactgtctaatgttttgtgtaccttttctttaagccacattactggaagatagttaaactggagtgctgaacacaacctctcagtgacttattttcgtgaaataacaaattatatatggcatttggtaactataagctctctgttaacaaacactttccaggatggagagaaccagaaaccctgagactgggttacagagttgggaagggcatctgttagggtactgggtcacacaggccaaggaacacaggctggtaggcactgggcaggaacctgctgtgaccaatatatacagcatatacaatatatattgtatatgtacaatataccgatgtgactggtgggttcacaaggctactcggtcctctctgatcactgttttgcaggtatgctggaaacacaatagctacttgaaggctcttgttctgagttttagctttcttctgtggtctccacagtgaccaccatcttcctatttgtgaaacatcagctacctcattccctttagaaagcattatctgcagttggatcctgggcactgaattagctgcctggcctccagcactgtaccaagcctccagactctgcctccactttaaataacaaaatactgtaaaaaagtccatagccatgtagatagaattggtaggccagagtcaggaaggcactatgggaggagtgggggtccagacatacaggaccttggaagacagcactggctataacagaacatcagtgtgttcaccctgctagaaatatgtgaccagacagatcaatagggcaggagacaaactggttggttaactcctgactcctgtccaggagagctcccaggtgaacttgcttagtggtcaggtctgtagaaggagagacagcagacaatggcaggcagcctagtccaggctgcaaggattgccactaaacacaggatgtggtaaggcaggtttgttcttcctgttgaagctttttgtcagttccactgtgagaagagccagtctgagcatgtccaacagatgacctgcctgacttcagagctgcagagaagaggggagcagcctggcctatgtagctgggggaaatacccctccccttcttgtgctggggtagtatgtgtgtcccagacagccctgagcacaaaaatggcagcaataatgaaacccactgtagagctggcgtttgtgttcagaggcgggacaagagagctgtgactgacacactcccggaggacagcctgtgattgtcacaggggctctctgtactaacgctgcagcttttctgaaaaaaaaaaaaaaaaaatggaagagggccccaagattagtctcttttttcagagacaacattctaccacaccagcagacggacaccagtgacagctatctgtgctgccaaagtgacttcaaaaaggtcccccgagcttcctagaaacctacagagtttcagaaccacagagtgtctttccatggatgagcctcaacagaagagatcgccactgtgctctcaggtagaggccaaagaacttcctccagggcatgtggtctcaaggtgtgagcctggagcctctagagaactacgcccagcagtctctgcctcagaaagaatgggtacgcagaccctgtgccccagagggagggccaatgaactgtccattagcacagcacacaggctggcttcaatgtcaacttacagcatggcaggaatatgaacaaggaccagctacgccacccactacttttggcgtcactcatttctaaattatacaaactgaatgtcacaggtaactgagcaatgtctcacagaagaatcacaagaagatgacgactgtataatacagtgctcactaatccccaatcactcaataatatatttgtcatcagtctgtaaacgttctttaagtcctacttgaacttgggacctgctaatgctgggggtggctcaatgctttgcctctagataactagttgtagctagcctggaactcactcagtttgtataccaggctggtcttgaactcaggaacccacctgtctctttgctcccgactttttttttttttaaatatttttaaagattcatttatttattatacgtaagtacactgtagctgtcttcagacaatccagaagagggagtcagatcttgttacggatggttgtgccccaccatgcggttgctgggatttgaactccgaaccagctgccagctgattacttcggtactctcagttcatcctggggttgaaagagcagtcgggtgctcttaccactgagccatctcaccagccctgctcccgacttctttgaaggctttcacattattacatttatttatgcgtgggtgtttgaacatacatgacatggtacacgtgtgcaggtcagagaacttgcaggagtccagcatgttagtccaggagtcaggtcaccaggcctggcagcaagtgccttcacatcctggaccacctcactggcctcttcagcaccttaagaagtgaataattgggctctatgttcagtgtgaggcgcacctgagctcatgagagaacagcagaggatggaggcaccgggccggcttccctggctgccagctgattacttcggtactctcagttcatcctggggttgaaaggtcacagggagtctgttatgtgactgagtccagggatcaaaagcagggactattgagccacagggcctgtattagataaggcctgtatcctgaattcagagagggagccacactatactaggtgtggacctccctgaaggacccagccagtgagaagttccatgtcagagaaatgcatcagggactagaagaaacaccattttgcctctgcacagcagctatttttgccttttgtctaggctgaggcctgactctgcttgtctcagtcttgctatcccgggtctcctgtcctttgattatgaagtaagggtctttgcctctcacacccagagatcatatgactgagcactatgccaaatgacggcctggagaaaatgaagccactttcctccaatcagagtctttgaagctttcatgtgccctcagctcttcaggcagccccgcttctgctgtgtcctctcacatacatgttcacagaaccccagcaggtctactccatctggcctcttctgtttctagggcaagggaagcaaagaccttactacagatcccagccccgcctctcacaagcagtttataagccactttcagcccatctaagatggatgttccttctgtgtgtatgcttgctggtgatgctgcaggggaaataggtagaagacagacatgtcgctcctgccacagccttgtttttctagtctattaaaagcataaaaggatagccaagcggcagtgacacaaacctttaatcctagcactagggaggcagaggcacctggatctctgagttgagtccagcctggtgtacaaagcaagttccaagacagctagggttacacagagaaatcctgtctcaaaaaccaaaaccagggctggtgagatggctcagtgggtaagagcacctgactgctcttccaaaggtctggagttcaaatcccagcaaccacatgatggctcacaaccatccgtaacaagatcttctgaagacagctacagtatacttacatataataaacaaacaaacaaatcttaaaacaaaacaaaacaaaacaaaaacaaaacgcatatgaggtgccttggaattcagtacatacagacatatagtcccagaacctggaattcagtacatacagacatatagtcccagaacctgggaggcagatgcagcaggattgtaagttctagaccaacctgggctacacagcaaccaagaaagaaaggtgtgtgtgcccctgtgtaagagctccaatgtccccaagtgggagtgaaatagaacgagacagtgagggccagccgtcgtggtgcttggccatggctgagcattacaggctaccctgccgtcgctatctctgggtcagaaagtagcagcactgggatgactgtccagaatggtgtctagtctaagtgttgctgatggacaagctgcaggtagaatggtgactcccaggagcattcccaagggtcctcagaggagacggaagggagggatgcccatctcctccctgaacacctacttcagaagtgcagcatgagggcggactggggtggaggacattcttcttttcagacccatccaggcagaattccaaaggccctttgtccagcaccatggctgtccctttaaggcagcagctctgcttttgcaggcgtggcctccacaggttacacagaggatgagagggaagctggctggtatccggacgctggaagaaactgccagaacctggcctacataaacacctgaagcctgataactgaaagtaggaaagctgggggctagagagctggctcaccgggtaagagcactggctgctctactacaggaccagagttcaattctcagcacccacatggcaacacaactgtctataactccagtttcaagggatctgacaccctcacacagccagacacacaaaacaccaatatataaaaaaataaaagtaggtaaatcattaaacaaaacaaaacaaaaacaaaaacatgtgctagagagatggctcagtggttaagaacactgactactcttccagaggtcctgagttcaattcccagcaaccacatggtggctcacaaccatctgtaatgagatctgacgtcctcttctggtgtgtctgaagacagctacagtgtatgtatttataataaaataaataaatctttttaaaaaatctaagctgttaaaaaaaagtatgacagctgtgtgctatgtgttgcatgctctgtgctgcatgttgcatgccgtatactgcatgctgtatgttgtgcactgagtgctctgtattgtgtgctctgtgtgtgctgcatgctggctgaaacgtaaacttacactatgtgggccaggctagaggctctgggagatggatgaatggaccagtgttgcatgttctgggctgcatgtcgtgccgtgtgcctaggaggttggtcctacaatgggtcatcacttcaggtactagctatgaaaagggagccttgcgcatcctccctcagaacactggtagagaatgatctgagaagctgggtctcaacgagaaaaatggaataggtgtgagtgtctgctagacagacaattgaagaagacaaaagcattaaatccagattcatcacaaaggtctgcgagcaggcacaggccgaggggctgggttaatagtatttaactggaggccaagagcaagtgaaaccaccatggatttcctgcccagctgcctaataaacaccaaactgaaaccttggaaagggccatgctggctgtggggagagagccaagtacttactctatggtagcctgtctggcttgaacttgctatgtagtccaggcttgcatgaactcattccccgttggaatcagaagtgtgcgcaccatcaccgtgcctaaccttttgcctgtgcctttttatccctgatcgggtgtgttcctgtgaatgaattaactcctgtgaaataactgtctttctacccagcccctagggacagctccttcttgagtctatgaagtcagcatttctaggtgtcccactgttgtatagacaggttccctcaagcagttccttggggactcagggatgagcagtggcatctctggtcagcagccaggaagacaacagtggagggtcacgctcctgctctggggctgtcttactcaagcaaatataagttcattctggagaaggcaagaccagctcttccttgtcagagtctgagcagacgaaccctcctgtgcctgtgcctttgaactgctcagcaagtgggcaagggctcttggatgcagtggttaatagaagaccctgcggctgctcagccagcttggtttctgttggacgcagtgtccttgacaggcaagggcatttgcttttctgccctgtttatttagtctctgcacatgtaatctctctctctctctctctcacacatgcactctcattgttaaaagtagcatatatacacagaaaatcctgtaacaaattgcttcagctaggctaaatttgaaaattccaaataaaatgtgaaagttggcagactcaggacccctccagccgtgttaaattaactcctgcactacctcctgaaagcccctcagtgaggcttctcagatggccctagtacacaccccaagtagaaagggtcccagcatggtctttccactccaacacaagcattgcttgccacttttatcctgtgatcaagcaggactgcttgcaaatcaaactgtgatggcaagggattattttctcagagagtacaggttcagaggatgcaaactcagtaatgccagttagtgtttaggttccagttggtatgtttagatgtttatgtttcagccaatctcaagaaaatccacactttttctacacgtaaaaagaagacacctgagctattcaccacaattccctccccctcctactttgtacatttagggacccacaacagagccttcctataggactctaatgaggtgccaggagggccagtcctcaaaagatttgagttctagtttagaaccctccagggtaccagagctcagggactaactgctgtgtttagcacatttatcaaagccatcattatgtatgctgggctgtgcacccaggagccagatggtgacagggttcttcacttccctctggtctgttcccaccagccatgtgactctggtcacacagcagtcaaggcctgttccatcaccagcttcagtacaagaccagccactgtgcccaactgacagttagtgggttctatttgctaatatattgatatttattgtttgtttgtttgtttgtttgagataggtctcactatgtagctctggcctagtcactatgtagactaggctggattggaactcacagagctccacctgcttctgccttccaagtgctgggattaaaggtgtattccactacacccagcttgttatatatttttaaaattttataattctttgtgtatgactgttttacttgcatgtatatatgatcaccaaacatatgtagtgcccgtggaactcttcagactgaaggaaagcctgaagaagagttaaatagtgtcaagttattatgactaataatgttgcaaaatactgaaataactggaggaagtaggccattatcaagtacatagcaatttcaccaaaacagagcacacactacaacacaaaatgaaccctaatgaactgcagcaggataaggtgacacagtcctaaaaacaccaagtagactgaggcaggaggatcatgagatggccagtcagagctaaataggaagatcctgcctcaaaaccaaaccaggcctggtggctttcctataaccccagtacttgatggcctggtggctttcctataaccccagtacctggaggttagagggaggaggatcccaagtttaaggccagcctcgtttacctggcaagttgaaggctagcctgggctacataacccccgggtggatgtggtggtgtactctttactctcagcattgagcactgagcagcagaggcagtggatctgtgagttccaaggcagccaggactatatagagggactctgtctcaaaaccaaaacaaacaaacaaacaaatccacataaaataacaaacataactaaagtcccacagaaaacagttttcagagccacactagaatgaggacaactgccacaagaaacacagaaaatccttaactacctgggaatcccacatatttctaagagatccagatcaagtgtgaaagcagacccgcatccagccatcacctgcttctcagcagatctctggtggggaaaggaaagtcgtctccacaactgttgctggggtgactgaaggaaaacggatctcaagatccatagtgttgtggtgacaggaaggggacactgctgggcctctgcactgctgcaaagctccacagctcgccactgacttctgacaagtgtaggaggcaggaatgccaggggatgacactgggagccactggggtagctgccctcaccaggggctggtgatgttagccaaagctctaataggatataggcattttactgtggttcaattttgctttcataaaaaaaaaaaaaagtccaaagcacacagaaaatgttaatagtcatttatctttggatgcattgggccctggtgttgagacgctacaggaaaacatggtggtcacaaggtcacagcatcctccatcgcccacaggaggcagggcactgcagcggctgatggaaaactgtgtttatgtatccgatccgcaccaagttacactttacagagttaaaataggagacaagttttactatataaaaatagcctgaatgtagaaacagctatgaatactatgcactcaaaaataatggttggtgtatataaaaacgttttccctgctgaaatacactaatcttaaacaaaatgtttcattagtgtctgctaccctcgtttgtattattttccagatctcccttctcagggccaatagatcaatgatcttcgtaggccagcacaggagtcacaggctatcccagggccaagggagggtgatgggtacgggtctgagctcacattacctctttcctctctgtatcaacctgcattctcgcctgggtcacagcagcttccctgcaagagctcgcctgcttggcttgttcaaacagcgtcttcagctgctgagctgtgttgagtagggagttgaccatctcttccaggtacagccagctccgatgttctgacatctccagcccactgaccacggtgggagagacagctttggtgggggtggacggtggcacggccaatgcgggcagcgatgtcaggactagaatgtagaatgtgggataaaccagagattagtgatttccaggcttagttccagcctcgggtgggaggagatgcactggagatgaacaatgtccccactcttgctcgaattcccacacgctattagctaaaagccttccctgagggctgatcacttctaacataaggcctacagtagaagctcacagacagacaagagaaagtaaaagcaaccaagacactcacccagagaaggggtagccatgaaacacagaagcaaacagccacaggacaagcacactgagggcaaggagaatggagacattctgccagcaccacacacaggaaaaccaaggcttatctggaaagtctttctggggtctgcagtcaacatggacgtgagagccatgattctcctggctggagaagaaagccaccaagatagacagaggggaccagaacacactgtgattttagaggagacaatgtgaacctcttctgcaggtgggtctagaagagaggtgcatgtgggagtgcaaagcactttctactgtagtctactgagaagtctgggaatagacacactatagacacccaacgtgacagggcttctgcgggattctttttctaccgcacagagcctctttccattctcctgtgaactggacaaggcacccagtcatcacaaaagccagtactcaacagttgcaacctctacgatgaaggcgagatattccagtggcttctgaagggaggggagacataaaacttgggatgagggctagtatagtaaggttgctcagtgagtaaagcacttgcagcacaagcataaaaacctgagttcgaatcccaggaactcaggtaagatctagatgtgatagtgcacatctgcaatcccagcatgcctctgagctttgaggggagactgaggagacaggagagactgcccaggctctgaatgacagctagcctagtactggcagtgcaaaaacaagaggcctgtgtcagaaaaggtggatggtgaagtctgatccccaggtcagtctctgccctccacatgcacatgctacagtgcaccaggacatcataagaccacactcaacacacacatgagcgtaaaaacacacatgctgggtatggtagcccatgtctttaaccccagcactcaaacaacagaggaaggagatttctgtgagctcaaagccaacctatatatcaagttctagccacagctatatagggaggccccagtacacacacacacacacacacacacagagagagagagagagagagactgattgactaatgaaaataggagacaaaacactgaagcatgttgggtaatgcctgcaattactcttaaatagtttttttggggggaggaagttctttttattgtatttacaactcttttgaatatgtgaaatctatttttaaaaacatattttaatgttattaaatatctgtggctcctgcaagctgagtcccaaaatgagcagtagagaacgcatcctcctcagaaaagatgggacctaggctacagcagagatggagaggaggctgacatgggtttctcaatgctgagaaacttgacaagtataaaaccaaatgcccatcagcagaggaagatgcaggtagatgtacctttaaaaagtatactgacacagaaatttgctcaagatgtgccactaagtgaaaacccaaagtcaaggtgcccacacagagagggtcacctcggctctcaactatgggaacacagatactggcacagtccctcacaccaaataccacttgatccaattccatggtcaaggcaaggagataagtctactcacagatttctgttagggtggacctgacaataccaacaataggtcatttcagtctctatggaagcagcctgatacaaacaaaagaaaccttatatatgagtgaatagcatggttgtatgtaataaaactttattagcaaacacaggtagaaggcttgaccttgtcaaccctaacctagtactctgagagaaaacaataaacacattggcaaagccctattccactcacaagaaacagttctggggttggggcattgggtcagaggtagggcactcgcccagcatgtatgagatgctactgggctccactgccagcactacagtgaataaaaatcaaacaaaaacataattttgaggactatagcttacatgcacataaattcttttatactcaccaattttggggtgtgatgttggcaatgcagcttctggaaacggggcaatctggcagctgtcctgatagccagggtagtggggttcagggtggccaaccctgcagggaggctgcacacctgcctcttgcactgtgagagagaagcagatagcctcagcgcagcagatttagtcccaagtcctacagctgcgcactcaatccagagatcccagcccttggtggctgtgagtgacctgagtacatattttgaatccaggatactctggaattcaggtggttgaagaaattaaacttattacaaaatatatcatgtgggctggtgagatggctcagcaggtaagagcactcactcactgcttttctgacggtcctgagttcaaatcccagcaaccacatggtggctcacaaccacctataacgagatctgatactctcttctagagtgtctggagacagctacagcatacttacatctaataaataaataaatctataaatctttgggaaaaaagatatcatgtgctttgttaacacgactttagaatatttaaaatgacacatgactaggatggtttcctttttttaagatttatttattaaatgtatatatgagtatattgtagctgtatagatggttgtgagccttcatgtgattgttggaaattgaattttaggacttctgctccctccgatcaaccccgtcattccaattggccctgctccagcccaaatattttttattattatacataagtacactgtagctgtcttcagacgtgccaaaagagggattacaggtagttttgagccaccatgtggttgctgggattcaaactcaggaccttcggaaaagcagtcggcactctaacctgctgagccatctcgccagcccctgactaggattgtttctagtggctggtgtcagtctaaagcaacatcagcaacgctacctatttccggctctgtgtgttggtcacagtgcttagtgctttttctccaatacccaccaggctcctttcaagattgagtcctgctcaagtctctgctgaggagccaggcaacagagactgtcatagggactggggacacatcaggcagatcctgagacagcttacctgtggctcctgcaaagacatcaccttgggctgggctctcagagatgacagcagtggcctctacagtggatgctctgtcaaaggtcagtgctccagaggtagtgatctgtcctgagggtgtcacagtgactgaaaaggcaaaaaggcacttgattcaaggccacatcaggcactgggctggaagcatgcactgctctttacaaaggtgcacgcttcagagagatcccaggagcttacacagggacataccccacatgtggtatgacatcaggaagtcagtgaccttgaatcctaggggaaagagccagagagggtgggactcaggccaaatctgactgtggggccaggaactgtgcactccagacagaaaataaaatgtggacgaactttaaaatatttggtagtttgaatcaaaggaagacttttcattgtcagattatctcagaaatgagaatccttgagttgggctaagatagaaagacaggatgacaactcagcaaagcacttctgtgctatgctagcactcacaggtggtggccgccgtggcaggaagcagggtgatgttcttgggggaatccttcttcactggagttgtgggcagctcattctctttcttgcgccttttataagggacgaagagcctgacagggccactctgtggggagaaaggtaaaactgaccaagggcaacatttgaagggcgcctccttcttcccactccttatcaaattagtgactctattactactgcagagagcagacgtccacaggagccctcagaatggtagagaagacattttctgaagaaatccatgaagagcactgctgccaggcaagcacacagcctcgacatctggagctttagattcgtagaagggaagtgggccaagggaaggagaacaaggaaaccccagcctgaaatgaaaatcagcagcagtggaagcgtcgtgcagagccatctgcaactcaagggagcggctggcgcgggtctataatctcaacaaccaaggcagaggcaagataactgccacatgttcaagtccagcctggttacagtgtgaggccccacctcaaaaagaaaaagtttagaggctaggcccagtggcacaggcctttaatcccagcccttgggaagtagagacaggtggatctttgtgagcttaagaccagcctcatctacatagtgagatcctgtcctgaaaatgaaaacaaacaaacaaaaagctcagtggtagatgacagcacttgacagccaccaaacctatcaagactgaaacctgagtttgatccatgtctccttaattccctatagacatgcccataaaatatctgatataaacaattcctcaactgagattcctccttctaggtagtgcacacctcttacctggtgagtgctgacattacaggtatgtgaaatctatgtgatgcagggggttgaacccagtggttctgtgcatgctgggcaaacattcttccaactgagctacatccctagccctcccctctttttttttttttgctttttcgagacagggtttctctgtgtagccctggctgtcctggaactcactctgtagaccaggctggcctcgaactcagaaatctgcctgcctctgcctcccgagtgctgggattaaaggcgtgctggcgccaccatgctctagccctcccctcctttctgtggttctttagcatctgagcatgcacctctcctgactacagctgctgttgctactgtgctgtgtgggctgtgcttctttctcatcgccaccttagtttagtggtgaaccagaccttacaggcgacacgctgtggcaggagtgggtattgacacccactagccctggctttttgctgttgcagtgtctcctgcagggtgtaatggcctctgagagttcaacctgtgtgtgcaattacctcaggtcaaagtaagcctctggctagttggttctgtctttggcttctcttctaagcagtgccaacttgtagagctacagtagggctcagagttcctaacagattcctggcatgaaaattgccattatcttagcaggttaaccaatgactcttcaaggcaaactctggagtctgctcttaaccaacctgagcaggcttttcttagctgctggtttttggcttttttgtttttttgttttttttaagacttatttattgtatgtatatgagtacactgttgctgtcttcagacacaccaggaaagggtatcagatcccattagagatggttgtgagccaccatatgggtgctaggaattgaactcaggacctccagaagaacagtcagtgctcttaaccactgagccatctctccagccccaaggtgctgcttttcttaattctctagctaattcgaggcagcatcttgctctcgtgtggctataagtcttcccactgttctcagaatattcttggcttcagacatccctatagtctctaaaacagtcacttctttagaggagtcatagttcattctatctaaacggcagccccactgtgtgatcagggattaagtcccattgcaattggaaagtcatcctaagaacattctcagtagaagagaccaagcaataggtccagccagcttgatccggaggggctgaggtaagggctctcagcctagcacttttggaaagttactataccctatagctattaggtgagcaaggctatagcccacccctgttattaggaaacctatctatcccttggtgggctgagcgagaaggaccaacctggagtggagcctctctcaacctgagcaagaggagggtccctgccgcacctctggcagctcttcttctttgcacttggaactcttcttgggtgtttactgagtggtggggtccctagggtcaatctccagagaccccaggtaggtgtctttcagttgtcaccacttacttctttggaaatagactaatggaacacctcacatccccttgagcagtggttctcaaccttcctaatgcttcaatcccttaatatagttcctcatgttatggtgacctcgagccactccataactctaattttgctactgttatgagtcgtgatgtaaatatctgatatgcaacccctgtgtaaggcgagttgttcaacccccaagggttatgacccgcaggttgagattgctgccctagtggaagtcaaagcttaaaaaacccacaaagcccagactactgagcagtatttaactttggttccatgtcttagaaactctgactctaaccctaggttgtcacaaaggtgcttccttctaaaatgtcacagcatgtcctctcatggttagatctttgctacaatttgaattccctttaatctatagtgtagtttgggtcaaagttcattccttgtccagaaacattcaatggttcagcaccacggttggaaagatggggttggcagctggactctgctcagttcccagaggtccctgatcctctctgctgatacactgtagctgctgaccacagcaacagagaacctgtacaagcctccctgctgatacactgtagctgctgaccacagcaacagagaacctgtagaagcccagtggagcttggcaagttcagacttgcctttttctactttttttttttttcctgaaatacagtctcataaagtagccctggctggcctgaaactcactatgtagactggactgacctctatccacagaaatccacctgcctttgcttcctgagtactggaattaaaggcctgtgctaccacacctaactttgagacttctttttcaaaactgctttggctactttatttccttcatcctttcatataaactttagaatcagtctttctgtacctagagaatcctgttgaaattctgactacactggacctgtcagttgggaagttagctccctcactatgtatgctgagcctcccctccgtgaggcagtctgacttgaggtatccagggtttttgctgactgcctttatcagcactttctagttttcacaacacaaagtccaccatattttataagatttatacctagagacttatgctttacagcaacgtcaatggttctgtgttgtgtcctgaaatacttaaaaagaccaatccctgaatgctactctgtgatactttagagtctctgactatctcccattggggtggggtggggtgtttgtttgtgtttttttcaagacaagatttttctgtgtagtgctgactatcctggaacttgctctgtagaacaggctggtctcaaactcacagagatccgcctacctctgcctctggagtgctagattaaaggcatgagccaccactggcccccatttttttgttttggagtatttttaaaatgatgtttaaaattatatcattttcattaaagtttttatagtagaatcatattaagattaaattaagtttagtgatggaaaaccctttaatcctagcacttgggaagcagaggcaggcagatctctgagttcaaggccagcctggtctaaatattgagttccaggatagccaaggatacacagtaagagtctgtaaacaagcaaataaaatatttaagtatacttggtatttacagccaagaacatagcatctctccaattgcaatttctttctgccccacattcacatgcatgtggacagcactaattgaactcatgaaagaaaacttatgaaagaaaaaaataagaggaaatggagatgaaaggggaacatgctgaaaaggatgtagggaagtgggagggagagtggaggtgtgtgtgatcaagacacattgtataaacgtatgaaactgtcaactagtctaaaaatagtaagacagggtttctctgtatagccttggctgtcctggaatttgctctatcaactaagatggcctgcctgcctttgtctcccaagtgctgggagattaaaggaatgtcttaaaattttttctcaggagctgcacagatggttcagaggtttagagcacagctgttcttgcagaggacctgtattttatcccagcacccacaaggtggatcccagcacccataaggtggctcacatcatctatagtctagttgaacaagatctgatgccctcttctactcataaatataaacaaaataaatatttttaaaaattctctctatttttaaaaataggacttcattaaaaagactggctggcctaagattttttatgtaacccaagcaggtttccaaaggtggcaatttcttgtggtgatttgaatgaaaataggctcacagggagtggcactattaggaggtgtggccttgttgatgaatgtgtgtcactgggaacgggttttgaggtttcaggtgtctaagccaggcccagtgtcactctctctccctgctgcctgtcaatccagatgctaccactccagcaccatgtctgtctgcatgcatgccgccatgtttcctaccatgacaataatggactaaacctttgaactttaagtcagccccaagtaaatgtttttcctttataagagttgccaaggtcatggtgcctcttcgcagcaacaggaaccctaaataagagacactccatctcctaagtgctgggatccagccatattgcaccatgcctgacttaaatttttatttttatcaactagtaacttaacagattattaatgaaactaaaccaaggaaatcataactaggcagcttctacattatttttaagacatttaaaaataatttgcattactaaggagagtggaaataaaagtaatatgctcatgttagcatctcatgttttaaaactacatagtatagctgagcaatggtggctcacgcctttaatcccagcacttgggaggccaaggcaggtggatttctgagtttgaggccagcctggtctacagagtgagttccaggacagccagggctatacagagaaaccctgtcttgaaaaaaaaacaaaaacaaaaaaccaaacctacatagtaatatttagcaaaataaataagatcatgcttcttgaatcagttatgaatttaaaatgaggagctatttcaaggacattaaaagatctagccatgataagataggggctttggttccctgaatctgggcctttcacatgctaagtaagtgctccatcacctacctatatccccctctctttttatttatcttctttcctttatttttttctcaagacagggtttcactgtgtggccctggctgtcctggaactcactctgtagaccaggctaaccttgaactcacagagatccatctagggttagggctagggttaggcagcacaggtacaggaggcagcatgagggttcaaaataccatcctaaaatagagaaggacctccctcctgagtgctgggactaaagccatgcaccaccatgactagcatctctttaacttttcatttcaagagtttcactaagttgtccaggctggcaagaactcactctaagtcaggaacattttgaacttccaatcttcctgttttagccttcctagtagctggaatgataactttttgctacacgcctggctgtgtagtgtcacaacacaatgttgaaagaggtggcacatgtgtgtttaccatacccactttaaaggaggcataactctgggctcacctggctcaacacagccttcccatttcagtgtcctgggttcctttacagccgccttctaccaggcgaaggcagcagcctccagagccaatagaactctagaaaaggagagacagagcctctgcaggcaggaacacctaaggacttaccagagtcatgtcatcacaacaggcggcacaggtacaggaggcagcgtgagggttcaaaataccatcctgaaacagaggaggagatacagatattatataggtacaaatatagaactatatagctatacagacagaaatataggatttagggagttattaatcctatattgcacccaccaccaagataagaacctaagcataaaattcagtcacttctggaaagttcttctctgcacagtgctccattgccaacaggcttaagcctctcttcctaggaaggagactccacactgaacagtcacagtcagcagctaacctggagcaaaaatcaagtcttttttctagaaagtgggtgtagtggttaaggacatgtattactcttagagaggaccaaggttcaattctaagtaaccacatggcggctcatattgtctataattccagtcccagggaatctgacattacaggtaccatgcacgtggtatacatacacacatgtagacaaaacattcataaaataataaacctaaagaaaaagtttccttccttacaatgaaatcggagcaaaagcaaggcaggtgtggctggaccctgctcttgactctctacctctcttcccatgtatctgaggtgtctctcttctgtgcctactgttaccccatctgccccttctcccccaccatggtaattctctgagtcaatgccagcacacagctaggacaagaacatctagagggcagctgaactgctctggtcatagtgtgagtacttgtgccatgttccaggtcctaaggctgatgtagtcccagcacacacctgaatgaggcactgcaggggtctgccagcatagcggatgcttctcttccagtccttgctgctggctcttcctgccatagcttcaaactcagttgggctgtaccagttttctccctgcttgatacaccggccccggccacctgaaatgaaaggttcggtccttagaatctatcaaggcctgttgctgtcttgccttgatgacatcagttccttccactgccttttcaatttctctgccctgcatggcctctagtcacccaatacactgcctggcaagtcatctcaaatccactgtccatggtcactgtgagctgtgctgggtctccagtgagcattagcccacttcagggatcctctgtcatgagtggtctgagctggatccatgaacgcagggctgacagtccttgcacatctgtctcctctcctctaccatatttgcacatgacaggcttccttggcccagtttactaagagggtcacacaaaagaacaaagtcttacttaacatggaatgattgtagccaagcactgcctcacctgagccgagcctactcttgtagagcgtgccactgatgttccgacagcgcacaggcaactcgctgtcatacaccgaagggtcccagttgtacttggtaccacctttctcctggccaggtgccagtggggtaggaggagactggggacctgggcaaagagaggctatgaggatgagagcacagaatgacccggaagcccatgatgctccatccccaagcccaagtccaagcccctcaggtacatgaggacattgctaaagggtagtgccaacccttcagtgggcagcactccttctctgcctttctatagacctctatttagttttcaaattaacgcgcgcgcgcgcacgcacgcacgcacgcacgcacgcacgcacgcacgcacatgcacaggcacaaccgaggcctggggtcaggtgctgcaggtacctggagtgagaggtgctgctgggcccttcagcccagtggtctccacaatgctcccatctgtgtgtacaactattagtgtggctttttcagtgttcaggctgtcaccgatctgcagggctgtcctaccagactagaaggaaaggcactcttgtcagcataggacagcctgaggcgcattatctgacccaatgaaatgtggccctactgcaagacactagtcacttatcagcaagagaggatgtgcacttaggcccacaaatcctcttcatagacaaccccaagcacacaaggctagaaccaagaagacacagaggctattaagtgtgtgcacatttgtccaagctgaagtgtattgtgtgctcatatgcacagctgctgtctggacaccaagcaagtctgccttgtctaaggagagtttctgaaggctgcatataggaaacacaatggtgtgacagacacaaacggtctctgattttggacacaggtgctactgaaagcatcataggcgctgataacccgcaggagtgaacacgagcaaagggctactgggactgtaagccttgaaggaaggggcagggcagcctgatacagtcattcttcatgtgtttacggagctcaagagaaagcaagcaaagccaggcactgagaagatgttctgtttgggctaagagcagcctgagcctggtgaaacacaggcccacaaggccagctggcatggaggatggcctgactgcagcctaaggatttcttgtagctctctacctttctagatttatagtgcatctttcacgttaaaacccctagctcagctgggcagtggtggctcacgtctttaatcaatcccagcacttgggaggcagaggcaggtggatttctgagttcgaggccagcctggtctacaaagtggttccaggacagccagagctacacagagaaaccctgtctcaaaaaaaacaaactaaaccaaaccaaaccaaaacccccctagctcaaactgagtttcctgccttgcctgagagcacagggaggcacataggtcccccatggctccgagaactacaggtgttcactcacatctaacccgagagggtcttgagaatgaggatcaccctcatggactgtgcggcaaagtcaagggctggctctaaagagagttgccaggcacgctgaactacacccaagaacagcttaccaggacatgtcctgatatcgatgctgcgtttgccactgatgttgtgaagacgttatctgcagaggaccccacgttggccacagtcactgtggtcacttctacaaaagaatggaacagattggaactttcacacacggtgatgggagagcacaaaaggcaatgatcttacttgtgagccttaaagcgcccgtgtccacccagacattttaatacttctgttaatgctcagctgacatctctagtccagtctaaaatacttgcttctcccagaaaaggggaatctctacccttccccaccaaagcctttcacatgcagcaaaaacgtccaccataaccacccattcccactccaccactggcctttctccctttgcaaagaagctgcaagtcccataggtctaggacacctccttgtcgatcaagacatggcagactccagcctcatccctctccactgccatagctcaggccatcctacagtcttgtgtccactgtctgaggtctccatgacatccttccccagaaactcttcctcctgaaaaacacatcagcctgccacagccgctcctgcaacatgaacttcactcctcggggcaggtctaccagcagcaacttcagagcagctctacaaagatgtgtcaggtccctgaggcttcctgccacagggtctctaggttcttctgtatcctgctgcctgctactatggatcctttgtagttggccttgccaatctctatcagttctgtctgccgcccagcattctaaaatgcccaatacccagggaagcctttggcataaggaaaatacccaaagatgccaactggagtcctgccagccccattaatccagccctgaccaacctgtacccttgtacctgtctagatcctgtccataaccaatccatacatggggcacacctaatttaggaactcagctagcactgagctacctggatattatcagacttcaaaaacttacaagaagaaattagaaatcttctgatatataaatatacaactaaaactctaatacatacatatatacacatatacacacccaccatagatgcaattctattgtcaccacagacaaaatcatacttctttcctgaacttagaaaaatatacgcaaaaaaggataaaaattccttgaccccaaatcccaatatcaacccagaatccatggatgaaaatggagcattaaaaactccaggaaaagccagacaacaaaggcatatgtctttaatcccagaactcaggaggcagaggcaggcagatctgagttctagcccagcctggtctacagagggagttccaggataaccagggttacacagagagactctgtcttgaaagaaagaaggaaagagagaaagaaagaaagaaagaaagagagagagagagagagagagagagagagagagaaagagagaaagagagaaagagagaaagagagaaagagagaaagagagaaagaaagaaagagaaagaagctccaggaaagggaccagagatggctcagcagttaagagcactgtctgctcttccaaagatcctagattcaattcccagcacccacataagtggcttacaactccctataactccagttccaaaggaaccgaagcctttttctgactccaaggggatcaagcaaacatagagatacatgcaggcaaagcagccacacacattaaataaattaactttagaaaaagaagaacaacaactctgggaagagatccggatggctcagaaattttgagcatgctgttctttcagaggacccaagaacctatgtgaggtcctcacaaccatgtgtaactctagctccaagaggaattgcaggcacctgcaatcacatatatacacataaaaatatatatatatatctttttttttaaagctctaggaagcttccctcactcctgtgactggatctaggcttcaggtaggtaggtacagcagaaaacacgcggaagcaagggttctccaccactgcgttccagtgccaacggtctgaacacccacccagagttaagcttcagctctgatgtgccctgaataaaagcccaatgccaagcctgcagcttcacactggaaagaacgaaacaagacgcatggcaaaatgatggtcttccaaggattcgcatgtacaagcataaaacatataagagctccaattggtagggagttcaacactcaggaaggtcaaagggtggggtgtgtggtgggattgtaggaggcagtttggtgtggtatcacctgtacagggtgatacagctcagctcaaggctccatttgtcataaaacatgagaatcgggtgctctttgtgtgagaaaacagaaggagaaaaatggaaaactaagtgatggagaaggaggggatatctgcataggaagactaggagatacagcacggagcagctcatgtcacaatataaagcaaggctggtttctgcatcgttacctttgcaaggttgcctgccttggatgactctcttgcccctctcatgtcacacttgaactggcctttgagacagacaggtctaccagcagtaatgctgctgaccatacctggggcacctctagaacagaactcacatgtgacccatctgtgctctcagctcccaggaagcagcaggagaggacaaggcaggtggtaggtactgagaaagttccaaagggtaaaacagacaaagaacagagaggcacactcacacaagggagacacgtctgtatacagtgcagagcaaggctagaggagtgagagtgtgctgtgcgtgtgcatgtgtgtgtgcaagatgggcatgcagggcactgtgagatgcagggcagggaaagagcaagggtgcaagtcattgtgagatgcatgggcaggtgcagagtaggtgttcagggcattgtgagtgcacgggcaggtgtgaagtgcacaggtggtacagagcatgtatggggggcaggtgtcaggtgcaggggcatggacagaggcagggcaggcgtgcaggtcactgtgaggtgcactggcagggcaggtgctgggcaggtgtgcaggacaggtggaagagagccttccctggaagacagatgtgcatgacagatgcacaaagcatatggaaagtggcctgtgcctggtgcatgtgttcagagcttgcacgcgggaacccggtgaggcgcgaggccggcgggcgcacttgcctgcgaaggcggcggcggcggcggcggcctcatcggggctgggcagagcctcggtacccatatccatgtgcccagattcggccgccatcaccgccacagcggtgacccgccgcgtctcgcgctccgcctcggagtctgcgtcctcctccgagtcctcgtctctgcttaacaccggctcctccgcctcgctttccgctgcggccgcggcggccgccgccaccgcggcagcggccgccacagctgccgcctcggccaggcccagctgttttgccgccgagtccgagtcctccatacggactccaccgagtccgcccgaaggcgctgtccgggaccgcccgaagcgccaggcaccgagcccgaagcggggcccgaagaggccgcccgagttgggccgaggccgcccgaagccaccgcccgagcagcgaccgaagaggcagtctgacgcccgccgaaccgagccgaagctgcccgcagagccgagctgatggcccgagtgtagaaccgagcagctccgaagtttcccgaagcgcagaatctagataatacgaatggtcccgaagcttcccgaaagcttacgagcgtttcttgctcgctgtctaagaagcggatctgactgtggtcaccgaccgatagagctggccggctctgggcagtttctcccctgcttccaacgaagtctgggttcgcagacagaccctggcgccacgggatttctccaaccccctctcggggcggcgaaagccgaacccacacgaggcctcgccgaactccgccgaatacctccgagccgagttctccggagcctcagtgcccgcctccttctatccgaaagctcccgagtattgccggacgggagaatcgggcctcggccgctgtcggacgctcgctgcaccgcgcggcgggaggagcgaagatggcgggagggtgcggccaagaggctgctgggattgtggcggacccagcggcaaaatggcggccgtgcggccaggtgaggcgggcggggctacgcgatcgcagggacagtgtggtctcatgctgtcacgatgagaggctgtctgggctggctctgcaactcctctgattgtcaccttgttattccggaacctggtggcttaagcccactagcccggatttctgcgccggagttggagagcgaggggtggggggggtgtcttccggttgggcgtgggggcacttcgggtatcccggcggctgtcccgaagctcgtctctgtattccagtgatatacctgaggcacacactgggatacgcccctgtatacaaccatatcacaccttctgtgacccggggtccacctgtggattacccagagtacactatggtggcatacgaactacacaaccatatttcactaaagctgacatgcatggcatacctatggctcatcctgagcacacccttggcatacccgctgctcaccccgagtacgcccttgatacacctatctctcattttttcgatatacccttggcacaccgggtttacacattgagaatatccaggacaaccatatacgtatattcagctcacccctggcatatccacaatacactcgagttcccctgttgctcaccccagatgtaaggatgaataagaattacgtttgtagggaaaaaaaatgacttagtcaacctcaaacaactaaagcaggcttgttccagagacgtggctgttaaattctggccatttgatgatcagggcacaggatctagtcactcaatgaccacagttagttcaagacaataggccactcgctttagactggggtttttgtagctaagggtagggaaagggtgcttgttaagagcattctagataagttagctgttttccttagacaaactggttttggaatttctgggtcttttgtcttcttttgcacccgtagggtgtctgggatagggattggtgtctgaagtcaaggtcagctgcttttcttccccagttctcaaattcctggctttctggaactttgagtccgttggctttgatgggatttttttttttttaaaccaggtatagctgtgacacacccagtgtgtcctagggtacatcttgtcacacctgcagcttaccacatattcattcatagcatgcctctggcatgcgctagactccagatattcatagcatacattcagctcatcccaagcacacttatagttctcctcagcacctccaaggcatacctgaagtataccttggtacacccatggcatacctggtttacaccagacacaaccaaggcataatgtcagtttaccctgggtgaatacacacccatacacacacacacacacacacacacacacacacacacctgtggctaacctgagtcccgggcagccagaaggtgctgtagtcaatatttcaccatggctgagtcccaggctaaatgaggaggtctgagctcagatgatatgcaggcagggtccagtgctagcaatatggaacagaaactggtcttagccagctcagaccagtgtttgtccatccatccatccatccagtttcccaatgttccttaatgaagcaaatttcagaaatgtgattgtactacacgtgcagcctcacctgcagggcatccctactatatgctttgtttaacagctgccacaaacatgggagtgctgttgttgtgtgcctggttacagtaaaaagggagttctaggggagaaaatggtcttgaaattaagtcacataaaacacccagtttccagtctgggattatggctatctccactaatccaacaattaagaggctgagtcaggaagatggctatgagttccaggccaaacaggtcaaaactaaatagtgaggccttatctcagaattaaaacaaacatacaaaacattataatcttagcatttgagagactgaggcaggattataaattcaagattagcctaggctacataagagatccttgttcagaaagaaagcaagaaagcaagtaagcaagcaagaaagaaaagtcctaccagaagagggtagctataacctttgtcacaccaaaaaaatatttattcctttatatccacagtgaatttctgccttgtatctgttgatagtcacacggtgattaccaaaaatcactgataagaaaaatgttaaatagccaggcagtggtggtgcatgtctttaatcccagcacttgggaggcagaggcaggcagatttctgagttcgaggccagcctggtctacagtttaagttctaggacagccagggctacacagagaaaccctgtctcaaaaaaccaaaacaaaagaaaaaaaaaaggtgttaaatcccaaaagttagatagcaattcagccaaaatgaactcttgtaggattgaaaatgttagaattattttagttattagttatttaaatatgccatttagctagatgtggtggggcatatctttaatcccagttggaagacagctaactaactaacattgtgccatttgagggttttgttgtttttttaagaattatttatttatttttatatataaatatactgtagctgtcttcagacataccataagagggcatcagatcccattacagatggttgtgagccaccatgtgaactcaggacctctggaagagcagtcagtgctcttaaccactgagtcatctctccaggcccccatttgagagttttttgtttgtttgttttattctttaaccttttttttttttacagtccagcctttttctcctcctagtctgccctctgactgttccacattccatacctcctctcccccaacccctccaagaggatgtccctaactcttgtctctaccccactagacttccctactccttagggccttaagtctcttgagggttcgatgcatctctctcactgaatcaggacccatttgagggtttttatacagtaggtttttttgtttgtttgtttgtttgggttttttggtttttttgttttgtttttttccgagacagggtttctctgtatagctctggttgtcctggaactcactttgtaggccatgctggcctcgaactcagaaatccacctgcctcttcctcctgagtgctgggattaagggcgtgcgccaccacgcccggcttacagtaattttaaaatgtttcagtgtgtgtgtatggaggggagctcttaagtgcaaggtgcccacagaagccagaaggcattagacttcctggagctggagctacagacatttgtggctgcctcgtgtaggtgctgggaaccaaactttgattcttccataagaacggtatgtgcttacagatacttctgccatgggggggggggggggggggatatgtggctgttttggggattgaacctaggacttttgcatactagacaagtgttttgtcttttacgtatattccagccctgatccctagctattattaaaggatacaaaaggaggctggagaggtggctcagctgttaagagcactggctgctcttctagaggacataggtttgattcccaatacccatatggcaactcataaccatctataactccaatcccagggagtgcttttcatggcccccactcccacaccctcttctggcctctgctggcactttattcatgaggtgcatagacatacatacagtcaaaacatctatacatataaaagtaagggggtgattaaaaaatgattcaaaaggaagaaaaccccaatgaaggtaaaaccaacccaaatattgaccagtatctaggtagcctagtttagctagggcctggaaaagaacagatcaggtttactagagcagcctgtggaaatataatgccgctccagccactcacctggcttcctgctcccacacgtgcgcctgctgggaggctgtccaaaggctgttactaatgtcctgtgtttaccagtctatgacttgcccatgcaaaagtccacaactccagagtaagcagcttcaagctggccttcaaagttaagtgacccagagaaagtcagcaaggcatcacttccttctctgctgaaactctagggagcgcagggaactcacaggcaggcaggcagccgactgcagagctcgggttcaggtgctgctactgctgcactgtctctgctcggaagtcagcctcttctacaggaggccttggccaaagtctgggtttgtatggtgtgcatgcacgtgtagagacctgcacagcatgaatgtgcagctggtgtgagcctccacacaggcagtctgacccaggacacatcccatccagggaggggccaggcagattttcaaacacaaaacttcagacccagagacacaagggaggttccatcacaccctagagctgactctcacaagatgagggaaatatcacctgtgtggaacaggagatggtctgagagtctgcatagctacatggctgcttcagaaagtacacccccccccaaccccctaacagttattttgggaagttaagtaaaattctagcagaaaacaatgtcctagaagggatgatgtagaggcaattcaagaccctagctgcagccatagtgacttccgtttataaacgtggagtcagagaactaacatccactgtgttgttgctgttggtgtcttactggctatcttttgtcttccagggagaggctccatcaaggtggtatcctgctactgctccccaaggccttgaccaagcatagccccccagggctggactacactgttgaagacctggcacagtcagatttcagcctttttatgcctttcatgccccccactcccattctttctttaaatctgactagtaacttataagagggaatggattccatggtatactggctctgtcactcaccagctcagccttgtttcttccacgggcctggcacattaaggggatggccacttgcctgccaccaaccaaaccaacatggcaggaggcaaaacccccttagtttgaatggccaagtgatatattttctctaaagaaagttgccaggatcctctttgtaacttgtgacatgaatcagaataaagaattccctctgtcctgcctgcatctgctgaggacactgggtgcttaccatgccctaccagggtgggaaggggccagcatcactcccatgaccaccaggtgccctcagacgagcactccaggagcccaggtagcagtagaagccccaagtaggcaggcgccagtggttgggttccatgtccacctgtatgtgcccttctgtcagaatgtcccaggcttgctgattggcagctctgagtggcagagtggcgcctgggtaggtgtgtcccattggtgatcttgaggatccttgtgtcccattggtgatcctgaggttccttgattacttaccagctctcgtcagttcctcttcagatgctgtttcacctcagtgggctgtactctgccctgtacttcctagctacactcctgatgattgtatacaaaagtaagtgatgagcactgggctggagagatggctcagtggttaagagcaccgactgctcttccagaggtcctgagttcaaatcccagcaaccacatggtggctcacaaccatccgtaatgagatctgacaccctcttctggtgcatctgaaaacagctacagtgtacttggatataataataaataaatctttaaaaaaaaaaagtgatgagcgccaggcccatcaaaggaaatgtgcccctaagaaactgatctgagttctggctgtgtgtgttcctaggtcaggttttcagctatccttgtaactgtctggccctggatctggttctcttgcttctgatgggaattctcaaagtagctcagctctacctaggtgagttttccgtgataccataaaatgcttgtggtcccataggtgttctttcaaactctctgaaccatagtgtgggtcttggagtcactgtcattcaggcagccttacctggtgctttgctgtatcaccttctgttgtcattaagtattaaccatttattcaaaagccttgctccaagactaattgacgctggtgacatcctcctgtctagaaggatgtgtgtaccacagccgcactcaggcttgaagcccagcctaaagccagagctccagaactctcctctggacttcccgcttccctgttggtttcagccctcagggagaaagtctggcagagaggaagtctggagtttttgccaagtcccttgcagggacaggggaccttgcctccccaagcaggcttggtatcacatcagttcccaccttaagaggccactcttagccatttgcctgcctgcctgcctgcctatctgtctgtctgtctgtctatctatctatctatctatctatctatctatctatctatctagagacagagcctcctgtggctaaggctggccttgaactcctgatccttctgcctcttcctcctgagcactgggattagaggcttgcgtcatcacatccagttattgtgcattgatcaaacctagggctcctgcatgctaggcaagcactgtaacaactgaactacatccccaccccatcctttgtatttgttttcctaaatcacacagttcatttagagcagggttagggtcagaacatgtaggctcttctaatggacaaggaatccaaaagtaaaccgaggacgtcttcctgcagtagctggctgcagtgaccgcacaggtctaggtctctagctctgcccctactctttcctatactcagtcacagacatacataaaagaggtgccacatccaggaccattgcactgtcaggctctgatccttctcttttgattggatctggtacctcccccctctcttctgggagtagagtgtcctctctggtcattctagacagagctacagtgtctgctgccatggactgtgccggaatttgcacagcttgctcagtaggcagtgctcccatggtccctggaaaggtgctgcattgatgaacagtcaggtcaactcctagagtaccctgtagggggctgtcagcattggacatctctaagcacttagtactcagcaggcccatgagtaccccccccccaatccactagagtctgcctcctcagacacccagggcgagggtcagcaggccttcagacacaccccaagcagctggggtcagcagaccctctggcactcctggcagctggtcagctactggcagctccaagttggcattttccatgactgacccatttgtttgtaaagtgggcagttttgtttttcataagtattcatgaaattttccagaaccagcctgctttagcccagactgaaatatttttagatattttaaacacaatccctttgatcccacttggagttagaaataaggtggcaaatgcccacagttttcaaaccaaactgtttgtgccttaagagcacagaatctgagccttccctgttgtcactctctgacacagagtggccccaaagggcagtgtccaccaatcccatgaattcgttgacccttggcaagcaccctggcactgggcagttggcaagagttggcaagctgtcctgcagcccccacctcacttcatgtctgctctcttccccaggcacaaaaggcaacctgatggaggctgaagtgccactggctgccagcctggcattcacagcagtcggtggcctcctttctgttcacttcctactctggcagaccttggtactgtggatggactcggtcctcagcaccgttctcctggtgctgcatgggctggaggctggcctgcaagtggtggtcattgctgacttcatcaggtagatggagcagggtaacctgcacagcactgctccttagccctcagcaggttccttggcccagacaaggagactgtcttttttattgatcgtctgtagatagtttatacatattttttgggggagggggggagataccagagccagggagggacaaacttggaagcttgaagatgaccatcatggacaggagcctagtgaatcccagaaatgtcttctcaggtcttgtggctggggtgctgactatagcgggaccaccatgatccccagacagtagaaggtaaagcctttcaggaagtcaatggctaggggcagccctgcagctccaccttgtctcagccccagaaacatggcttcctggcaggagtgtacaaactgtgctggtcaccaccctgtgtttgctcacacacggattactgagttctgtgcttcccacgctggccctgggtcttgttctgagagcctgttgtacttagttgccagaccttggtccagggctgggatccctctggagctgcaggatggcagccttgtgttccagtggccctccaatttggctccccatcaggccagccctgaaatgaaactgcttggtttccaaaaggaaacaaaagcaaatgtattccaggtatggtggcacacaaaccttttagtcccagcacccaggaggcaaagatgggcatatctttgtgagttcaaagccagcctacctggtctacatagtgatttgcaagtcacccagggttacacggtgagaccttgtctttaaaaaaaaagaaaaaagtatacagagagctgggtattatgaccatctcagcccctttcatgggtgggggttggggaagttgtagggagcagaagacagaataaaagaaccgcttttagtctatgattctgggagtcgcagtccaccaaactgcagcctttgtagatgccaaatgaatctcatctcctgtttttcttttcctagcccatttttttctcagaaagtatttaagcagtattttttttttacagtttctttcattctgttatgtgttttctgtttatgtcgttatgttcaaatatctagtttctcttttaaaaaataaataagtaattatgctgtcatgactttgtcttcattataaccacctacattccccagggtccagtatggaagagccccacccccaccccctgtttccccttctcagccctatccaggacttactctgtaacctctacctggcttctctctaccctggtaactagccagaagcctccctgtgaagtatgttgaaggtggtaggtttctgggccgtccagagccttctctgggaccagggaaccttctatacacatgggtccttagctgatttcctttaactcatgtctcccagagactgggtgaataccagaactacctggagacgtgctctacctagcccacaggcagggttgggaaggagtaatgtctagaaagcctatgagcacttctctccacaatgtctctgtggcttgagcaagtatagcctgggtaggcagaatgggctaaggccggtgggtctggagggctcagccactcccctgttcttactggccacatggaagtggcattcactccatgtgacccagagtggacatcagttaccaccaccagcttgggctgcctcacagcaaaggttatgaagactgaccgccagcagcacaaaggagccatccctgagttgcattgcatgttttccaccctttacccatccctagctctgcccaggaatgtcagagcacacacataagcctgctcctcccattacacagctgaccacttgacccctgcttgctgggccagggcgaggtcacaggcagagcaagattggaccagttctgtgagatcagcagtaagggctatgaaccaggaagcctctctggggttcatcaagagctgggcttggggtccacttctgccactcctctgtccagctcacctgtgatgtcccaaagtgtgtcaagtgggcaacaagccaggctaaaaactgctgttggccctcagtaccccaggaagtgctaactgtccagggcccaggagaaatgtgccagggccctgcccttctgaggctgtagcctgggaccctgacttcctggcagcacccacttcctctgccccaactctgggaacaatagccggggccttagggtccctgttcacataagggcagtaccttggctagcaggccacaactcttgtttatttcctcctagccagctaattggctgatctaaattcacccaaccctgccccaagatgtcaaatagcaaggtgggcagagtagctttgaggggggttgtcaacatggtggagacaggtaccctcttctagagatagctcatccctcaggagatgctctagtggatggggactttaagaactcctgtatgtgaaggagggaggggcccccaccaggagctgaaagctcccaaactcaaaaagccttggacccaatgccccaggactaaaccactaaagagctctgtcccggtgctacttggggtggagggtacctgatggcggcttgattgagacttccccaaggctgcagcactcataggcttcatccagtactgcccctgcaggcaggcccatgtccccatctgctactgcagcttggccagttagagcagctggggccgcaccctgttctccggggccagctgcaaaggggccccaggtgctttggggaccgctgggagggcagtcagaggcaggcagggaggcagaaccacagttggtgtggtgggggggaatggtgcccgggcccgcccccttccttcaggctccctcgtgcccactcccgggtgactcggtaacctgtcgctcaggttcctcctcgcacagccccgccccggcctatccggcccagcagaggtcccgcctgtcccgggagagggagctccagaggctctgacagacagacggcggacaagctgaccgaggggcctaaccaagcacaggcgctgagggacggagcgcaggtgagcacttcagccagggaatttgccaatctgagcctcagtttcccagaatggccgtgagatgtggagctctcgctcgggactctgggtctgggcgcttggtttggaaggcaagccagaacagagagctgagagcacctgagagtgaggtttgggatggcccggatcggatctccggactcaggacagctaagccttggctaggggggctgcgggtgtggcgtgggacgtagaaacttgggggagaggctgggcctgacccttccttgggcttttagcacaagaaccgctcggttaaagcccggtcggtccagcgggtggtggccagtggttcgtgatatttttaagccagcggtgtgtgactcactcgccctggtcccggccccctcccagccctggggcggatgaggggaacctggcagttgacaagagaggtggtgaggaagggagggccttcatccagcaggctggacctccttcaggatctgacctgacataccacccagggcctaaaggttggccttttcctggctgtttgagctcaaaagaaacccagagcctgggaaacatcaggctgagtcagtcagtcttcaggtcaaagttgaagtgtggcctctcaggggatgagggtgggagatggggatagatgtgggggttggggatcagttggtgggaggggctatgaacatccatagcttgcccgggaccgagaagtctgcggtactacacaaaactatcgctggaggcagaaaagggcaaaacatgtccacagcccacctttgctatgtcccctgtgcagccctccttggctgctgaggagacagggcacttctggggcctttcccaccctagactctcagtgatcctactttgtgcgtggacttctcctggagctgtctattatctagggctgctttgcccattgctccctcccagcctgcctgggtctcttcagatgcacccatcccttcccacgaacaactttctggttcatctcagcctctgttgctcccacctgatgattcctgaactttgtccccagattaggacccagccaggtcctaagggactcccccttcccattccaggaccacacccagctcccacaaggagagccaagagcccaggtgactaagccgacccctccccaaggtcactcagtgtggagagctggaatttgaacttggagccagttcctccgccctccttgccctgccggggcctcctcccgttccactggtgaacctaccaaatgctctaacacgctgggcctcccttcaacccggaaagtggctacagtaaaaccagcctgagcccccaggccttctaggcctgggtgttacatcttcaccaccaatggattgtttggatttcctgcctccctacccccacttcagctctagaagcctccagggagggaaccttttgcagggtagaggtagccccagccttatccctcctacctagtcctaaggtcctggcctagatttccccaagggcagggctgcctgtccaagcctgttcagagtctgtgtgccttcaggcctgggtctctagcagtttgttttgtcctggtgtgtgtattcctggccccacgtgcctggtgcccttggctgagctagccaggaatcccattaagcaaacaccggggctcacctactgaggtcatgtgcattccggacattctccatggataggtggacctagaaatctggcccagcctcttcttataagctaggacctcggctgggggtaggggagcagccagaaagctggtcaaggtaatagctaaggcctacggtcctcgcctcctggtagcccacccctcaagacctgggcaaaccagaaaatactagagtgctacaggcctactcctgagccctcataccagtatcctggctgaaggcctgaccctagcagactcaaatgctgaagctaggaaggatggtggccttgttagtaatatcagacaaaggtagactatatgtgggtcattgggaagagctggccatagaacttcagaaggacagagagaaatgttatcgacctgtcattccagtgtcgtaacggcagcctgtcactgaaggtctctctacatccctcagttaatgtcaggctggcccagcccaccagattctgttgtatccagagaagggctcaggtcgagcctgtaaggaaagtttgctcacattcatggccatgcctcaatttccccaaaatgtacccaggggaagtcagagctgggaattctacttctgaagaggccttgtttgtatatagtcacctgggtttttactaggggggccagtcacccccaaaacttctgccctatacccatcctctccagggtctcccaagagggagataagaactggtctctttgctggatttggggaagctggcctctgtgagcatacccacacatatatgcaggggtccctaggagtgaagcctggggcaagggaggagtagtggggtccacctatactttgtgccctcctaggtctccctccagccttaccctctcctctctcactgcctcagggtttttgaaggaaccatcttctctcagattatcccccacccaacccctccatcagagcctcctgacagtttctaggaacacccttgcagagaaccaaaggtcctaggccaaatgagtctccattgccaccaccactagcatgggcctggaggactctgcttcctagagatcccctgaggactctgcccagcactgagtgttctagcacccggggcagaaagaaataagagaggagacccaggcctagcctggccaggagaaagggtcagctgagctcttctgtctttaggtctgccctccctgacactggctaccactgggaacgtcatgagccagtcagcatccatgagctgctgcccaggagctgccaagtaagtgttgtcctaccgcctcaagtccccagggaggggtgtgacatgagccctgccctcacctgcctctcccgctgcagcggcagtctgggccggtctgatggtgtgcccaggatgagcgcaaaggacctgtttggtgagtgaagtttaagggtggtatggacttaaggaggatgaacgtgaccatggcggtctcatccctgcctgctccggggctgagctctagcccagggaagttctaagggctcagaggaggcctctggaccctacttcactgagaactctggatatctatctgcaaggctcctggctactaaacgttctccactctgctgtaaggggagaggcctttacgaataattcagggagcattaatattgattccactgtgcagccctgcaatccgatcaagtaggtggggttagatgggacccagctgccaggtatctgctccaatggactgagctacttctgcttgcccgtgcccctccccaactatgcccttaacttgtgcttctggatgctggatgctggaagttggagccttggaaagcaagaactccagagaggaggcatgttcccgtgatagcttgtaggataggaaatccttggcccgggacccttccattagagggtgggcagcctccattagagaagactacatttcctgcccctcacccaaacagatcctcagtgagaggctgccccctcccattctgaataagtctcttgtcttctaaagcttcaggtccccagtggggcctgtgacagggccaagccagaggctctcctggggttcctccctgtcccacgggagcttctcagccttcaggggttcaaagagcagcacctctcatctggactctgttctcccctgtggtccctgggggtcacgtccttctagactgggtcttactctttggggtgcatgacatctgtgtctccatccagagcagaggaagaagtactccaactccaacgtcatcatgcatgagacttcacagtatcacgtgcaggtgaggaccaggaaataacccccatatttccagggacaggtggagaaactgaggctcagggagaagttgggaagagagagcaaaggactgtgctgcgctggtcctggacccagccatagtggggaaacggcttcctcagggctgagggagttcatagccatagcagagcctgctcagaccccttctctgtaagttggtacccatggcccacagcagccagggcgctgagacatcacctatgtcgctgggcagctcggaaaagaccatggaaggaagctgtcatcttggccccaaaacaaggaactgcactgggaggaacatgatggaacaaagacactctttattgagagctacagggagcctggatggcaaggctgagtctagacatagcctgtgccctttgaccagctgccagcttgagtggcctttctcctggtcacctctaatttgctgagaattcaagaactatgttttaatggctttcctgggactgggagctagctgggtttctggccataaactgagcttataagatagtgatgaggaatgacagagaagtagaaagaggagcccctgagcagccagcactcccaatgggtctcatgtattgctggctctcttctgtctccccactctacccaggacccttaccccagaagtgaggcaggctgctatccttacctccttgtctgtagaatggaccaaaagagccatcaggaaatccccatggctcctcaaccctgttctcttaggcgatcaaggttctggccacccacccacctgggtcaatgggccatgatcctgtgaccacagccactcagtgcccaaggacagggcatggaggcacagaagggtcagcaatgacctcttcctttacaatgtgccaccgttcgttctctgaagtggaactttgtcctccttggtgaggaactacgtgcggcatccagcctggctcctggactttgatccatcctgtttgacgctgccccactgctgcaggaacctctccttcctgctcgagggcagaggcagatgtttctgtcaggtttctctattgctccctgatgaaaagactgaggcccagagaaagaggctgagaagcattcagagctgtgcttgctttttctgactttttcctgactttttatacaataaatggatggtacagttctgttactatcagactgggacatacaagagtcccatctcccctaggtgactttgagagccccttgtgtccaaagccacccccatcctaatccctagcaatgctgatctgtcttgcatccccaacacttgtctttttgagaaatttaccctatccaggagatcccatggtccacagccacctttgtttcttgcttcatgaacttattttaagaaaaccatgctgagagaaaccatgtctcaaaacaaacagaaacaaaaaagctaaaagcaaaccttcctccagttggtaatttgttagctaatgtgtgtcaatatcttttgataaacagacatatttgatttggaggcacctcgtcataaacccatttttcttttctggttatttgttaatctgctagtgaaaagactaagtctactattgaagatttctgtgttttcaaggtagcataatcttttgcatctaggcccatgatcgactttattttgttttatttttgagaccctgtctctaattaattaagtagcatgttgctgacatttgattggcattgagtccaacctatcgagctattatcagtttagggagaattgacatcttaacaattttgtgtgttctcatctactagcatgggatgtttctccatttattaagatttctttaattttttttaacagtgttttctgattttcactttggtggtcatatttatatttaaattattctttagcttacaaatggcattgtgagaggtttccctagtacggtggttatcatgtcatgttcaccacataaataggagtgtggttttaatgttgcttcggtttcggttttggtttgggacagggtttcactatgtaaccctgattgacctggaatttgccatttagactagggtgatttccggggaatccaccaccttcctctgatctccctgtgcctgtgccggcactgaaggcatgtaccaccataccaggcacaaatggcacttcttattgttgttgttgttttgttttgctttttactttttctggtgttgtttaaaaattttttagattatttatgttatagtatgagtgttttgccctgtatgtatgtatgtatgtatgtatgtatgtatgtatgtatatatgtgcagtacatacatgtctggtacccatggaaggcattaaattccctggaactatagatgtagacagttgtgagctgccatgtagatcctgggaatggaaccagggtcctctgcaagaacaaaagtgttcgcaaccactgagccatctctccagtcccttttcattttttgaaattataatataattacatcattttcccccttccctttccttcctcaaaattctcccatatatcttttctagctctctttcaaattcatggccttttttttttttcgtcaattgctgttacatatatacatatgcatgtatatacatgtatattcctgagtatgcaacttgctcagtctatacagtgttactggtgtgtatgctttcagggttgaccatttggtatgggataacctcttggtgtgctgtgccttagggaagtcaatctcttcagccctcagcattcctcacttgccggtaggtcttggtgtatggttgatgctgaggccttgtgggttttccccatctactttggaatgtttactgttgttgtccttgttaatctcatgtttggcagtcatgttggtgagatgtgatgggtgtagcttctgacactcctaggagacacagtctcacagcaaactcctgatccccttgctcttacacagtcctttctgtcccttcatctacagtgcttcctgtgggagctgttttgtagatttatcattgggaccggggtttacagctctccattttgattggttgtggttttctgtaatggtctccttttgttgcaaaggaaagtttctttgttgaaggatgagaactacagttgtctgtggctataaggacaaatatttaaaatgtaactagggattatgctggtgtaataaagtggcagtagtagtttctcctccaagatctgtgacttcactagtcctggggagctgactaggttttcactacttggcatgatgtccctcttgctaatagaatcttagcctaagtaaacagctgtggtgaccaccaaagtatgtgcaccatagattgtgttggttttttttaaagatttatttattattatttgtaagtacactgtagctgtcttcagacactccagaagagggcgccagatctcgttacggatggttgtgagccaccatgtggttgctgggaattgaactccggaccttcggaagagcagtcagtgctcttaaccactgagccatctctccagccccagattgtggtttgtttgtttttttttttcttttttaatatttttcattaggtattttcctcatttacatttccaatgctatcccaaaagtccctcatacccttccccccactcccactttttggccctggcattcccctgtactggggaatataaagtttgcatgaccaatgggcctctctttccagtgatggccaactaggccatcttttgatacatatgcagctaagacaagcactccagggtactggttagttcatattgttgttccacctacagggttgcagttccctttagctccttgggtactttctctagctcctccattgggggccctgtgatccatccaatagctgactgtgacagattgtgttttttaaacttcatcgtctaattatctgccgattacataagctaaaaaagagagctttggtatggtagtctgagactttggtgaatttaatgatttccttgtagatcagactttcttcacagacaattatattgtttgaaaagaaatatctgtgggctggtgagatggctcagcgggtaagagcactgactgctcttctgaagatcctgagttcaaatcccagcaaccacatagtggctcacaaccaccggcgagtctgaagacagttacagtgttcttatgtataataataaataaatctttgggccagagcgagcagggccaatggacctgagaggacggggttgaccggagcaagcagaggtcctaaaaattcaattcccaacaaccacatgaaggctcacaaccatctgtacagctacagtgtactcatatacataaaataaataaatcttaaaaaaagaaaaaagaaaagaaatatctggagctggagtgacagctgagagctgaagaacatttgctgctctttcagaggaccagaatttagtccctgacacccacgttgggctactaagaaatattcgtaaatttagattaagaggatcttggcccctttctggcctctatgagcacccgtgcgcacacacacacacacacacacacacacacacacacacacacacacacaagtttttctctttgtttttacagaagctaggtatggtggcatgcacctttaatctcagccctgaagagagaggcaggtggatctctatgaatctgaggccagcctggtctacataaagacccatactgagccaagcggtggtggtgcatgcctttatttctagcaccctagaagcagtggcaggcagatctctgagtttgaggccagcctaatctacagagtaagttccagaacagctagagatacacagagaaactctgaaaaaaaaaatctaagaactaaaaaaaaaaattctgaatcctgaataaactttggtatttggcatatattgatttattcaagatgtcttccaggtgtattggctcacagttataatccagcctttagaggcagagccaggaggatcaccacaaatgcaaggctagctgtttgcatagcttgctccaggccagcctagactacagagtaagaccctaactcaaaaatgaagcaaacagctggccatggcagtacactctaatcccagcacttaggaggtagaagtaggagaataatctctgtgagttcaaggccagcctggcccacatagtaagttccaggacagtcagggctatacagagagatcctgtctcaaaagaaaaaaagataaaccaagcaaaatatattaccctactgggtatggtggccctactgtatatcttagcacttagcaggtagcaacaagagaattaggagttcaaggccagctaactataattttataatttcagcctccacagataccagcacatacccacatgcagacacacatacctacacataattaaaaatagttttgaaaaaaaatttttaaatggtttggggcgggctggtgagatggctcagtgggtaagagcacccgactgctcttccgaaggtcaggagttcaaatcccagcaaccacatggtggctcacaaccatccgtaacaagatctgattccctcttctggagtgtctgagtacagctacagtgtacttgcatataatcaataaataaatcttaaaaaaaaaaaaaaagagtatttaaaaaaaaaaaatggtttggggctagagagatggcagagtggttaaaagcacttgttgctcttgtagaggacctgagttcaattcccagcacacatatgacaactcacaagcatctacaacatcgtttccaagagatctaatgctgtcttctgccctccatgggtggctgcatgcacatatgaacttcaagcacacacacatatccacaggaaaacacacaagcagatgggtggatggatggataataaataaataaataaataaataaataaataaataaatacttgtttttttcagataagctcatggatggataataaataaataaataaataaatacttgttttttcagatatgctcaggctgtcctagaccttgctgtgtaggcaagactggcctcaggcatacagagatctgccttctgagtaccgggactaactgagtgcaccaccatacccagccctgaaatgaataatagtttttaatggagctggggtatatgattcagtattaatatacttgcctagcatacatgaggtcctagattcaatcctcggtattgcaaaaggaaaagatattttgtatgtattcataggctgtttgcgagcatttaactgaagattttaaaaaatttgtattagtatttatatgtgtgtcagagaggaaggcggagttccaggcagtcgtgagctgcctgacacaggagctgagaattgagctccgttcctctgcaaggacaaaatgtacccctaaccaccgaactatttcctcagtactgaagacattttagaagacaaatgtctgttagagacactgacctcaattttctacataataaccatggcagacttacagatcaggttatgttgacctaagacagtgagtggagaagttatcctctgtcctttatttaaaaaaaaaaaaaaaaaaaaaaagctggatgtggtggcgcacatctttaatcccagcacttgggaggcagaggcaggcagatttctgagttcgaggccagcctggtctacagagtgagtttcaggacagccagggatatacaaagaaaccctgtctcaaaaaaaaaaaaaaagtttgtgtagtgtattgtttcttacaaaaatatttgttaggatttaccactgaagccttctgactgcaagatttcctttgggggtggggagcagcgttgttttttatttttgttttttggtcttttcaagactgggtttttctgtagcattggcttgtcctgcctctgcccactgagtgctgggattaaaggtggttaagggtgtacaccaccatggctggcctacaagaccccctttgtagagaagtttaattctcatgtctgtgtgattctttagggtttttgaaaatcagcaggtctttttgtttgcttgtgtgtttggttggttggtgtttgattattgttgtagttgtttacttcctggctgttgttgttttgtttttgtggcagggtctttcaggttagtcctagcaagcctagaacgtgctatatagaccaggctggctttgaattggactgatcctcctgctcccacatgagtctgcctcccagagagctgtgattggaggaagacatcacctactgtgtcctgctcagacgtcactgttgcctctattcacccttgctaagggggtaactttggactttatttaattttctgtgtttatggtttactagcttgttaaggtaaaggctgagataattgatcttgagtagttttcttcctttatcaatttttaaaatgtaatgtatgagcgctctgctgcatatacatccgtaggtggccaaaagagagcatccgatcccttatagatggttatgagccaccatatgggtgctgggacttgaactaaagacctctggaagagcagagccatctgatttactcatcttaaccgctgagccatctccccacccccaagtgcctgttttcattttgttctgttttgttaagctccaaatatgttttaatcttcttacattttctttgtgacttcatttttggttttgttttgttccgttcttcatttctttgatttttgagacaaggtcttactatgtatctctggctgacctggaactcatagatcaggctgtcctggaattcagacagacccacttccctcagccttccgagtactggactaaaggcatgaggcgctatcatttgtctaggctatgacttcatttttgatccataagtcatgttttccatatgccattcacccatccatcgtttattcacgtttctgaggtttcactctctggcccagcctggcctgcaccgcctggcctccctgcttccatttcccaagcggagggatcacaagcattcatcaccatgcccagctttgagaattctttaaagtttttatttatttgtttgactgtttttgagacagggctccatagagcccagactagctaaccttgaacactgtgtagatgaagtgaaccttcaactccaggttcttctgtctggtatcttgccttgttgagattacagccctgctctaccacaccctgctgaagttttttgtattgatctctgctctaattccaccaaggtcaaaaacctctgtgctttcagtcttgtggcctttcctgagactcctttggtcgcctagcagcatgactttgtttggttagttgtgaggtgtttcgttttagtgtttaccctgcccgctacaaatggaagactcgtctcccatcccactgcgtttctgcctactcattgttgaacctgtttgcagccggcaagctggcctaactcttgcatctgtgcaggttacctacagtagttttgctaggggtagattcatacaaatgcttttcaaggtgtcactaatttgtcagtaaagaggctgggcaggagctagatgagagcactgcttctctgtctaaacacacaagtgtagctcacggggactttgggcaatggataggagaatgtgcaaaactcaatagtcatttcattcctgaaacaatagtctcctaagagtgtcagtttgcatattttttattcagtcaggcttcctgcatttcactttgttaaaaagttacattagtgaggctggagagattggttaagagttttgttgcttttacaaagaactcaagtttgtaaagttacaccagggactggaaagatggctcagagttaagagtgcttgcgcttacagaagatttgggttcgattccaaacacccacatggtggttcctctagttccaggggatcggatgccctagtctgacctccatgggcaccaggtactggtacacacacacgtatgaagattaaaatatatatatatatatatatatatatgtcaatcacaccaaacaagggtgttgtgtcacatgcctgtaatcccagcagcacttggaagacagagataagaggatcactacaagttcaaagccagcctgggccacttgtcaaattccaagctagccagagctacatagcaacaccctctcaaaacaaacaaacagggctggagagatggctcagtggttaagagcactgactgctcttccaaaaggtcctgagttcaattcccagcatccacatggtggctcacaaccatccgtaacgagatctgggtgccctcttctggagtgtctgaagacagctacagtgtacttacataaataaataaatctttttttaaaaagtgtttaaacaaacaaacaaacaagaagagattatttctggtttgaaaccagatttgtttttcagttttttcttgataaaggtccattcactctgcttaaaaaaaaaaaaaaaagaaagaaagaaagaaagaaagaaaaaagaaaaagaaagaaagaaaggcctggcttagtggcatggcacacctttaatcccagcagagacaggtggatccctgagttcaatgcctcatctacagaccaagttctagaacagccagagctacatagtcttcaaaaccaaataaaataaaataaaataaaataaaataaaataaaatagtataaaatacctgagccatgtgttggttacgtactcttttaatcccagcacttgggaggcagaagcaggtggatctctgagtttaaggtcaacctagtttacagagtgaattccaggacagccagagatacacagagaaccctttctcaataaataaataaataagcaagcaactaaacagatatataaatgaatagactagattaagtggctgggtgtgtacccacttgcctctcattccaacacttgggaggcagaggtagatgggtctctgagttctagactagccagggcaacagtgagaccctgtctcaaaataaataaataaaataataaaatataaaaataaaaaagttacttataacccagtgtggtggcacacacttgtaatctcggcaccaaggaagtttggacaaggagtgagttgtgaattcaaggacctgggccatatagtgagacactgtctcaaaatcctactccagggctggaggaatggctcagcagttaagagtacttactatctgctcctccagaagtccagaattcaatttccagcaaccacatggtggctaacaatcgtctataatgggatctgatggcctcttctgtcttgcgggcatacatgcaaatacagcactcatgtacataaataaatcttttcttttaagctgtactaaaaacttgcttattcttctgtagccttggtgctcctttccttcagttattttgttaggtgtttcctttttatcttggtttggttgttcgggggaggttgttttcaagacagggtttctctgtatagccctggctgtcctggcacttgctctgtagaccaggctggcctctaatttgcagagattcgcctgcctctgactcctgcgtgctgggattaaaagggttcactaccacggctcaactgcatgctgaactctttataaatataaacaaaactagccgggggctggagagatggcttttacagacatcccaagtttggttcccaacacccacatcaggcagttcatatctccctctacctctggctccaggggtgctaataccctcctctggtctcccctgacaccaggcacaaacatgttatacacatacatacatgcaagcaaaaacaatcatacataaaataaaaataaaggaaataaaaagaaaacaagcccaaatcaaggagagtgaaaccccaggaagctaaggtagaaggattactgtaagtctgaggacattctaagctacatagtgaattataggccagcctggctacagagtggaacctcccttcagaaaaggggcgagggtcttggggtgcagctcagtgtgtacagtatttacctaatatgcacaaagccttgggtttgatcctcagtaccacagacccatacaaatatggcagcataagcctgcaatcacatcacttgggagaatcaggaatacaaggtcatcttcagctgcatagcaagtctcagttgagaccagcctgcgttaaatgtttctcatatatatatgaaacagggtgtcagtgggtggcctgaaacttgctatgtgaatcaggctggcctcagcatcacagagatgtatctgtctgcctctgcctcctgagtgctgggattaaaagcatgtactaccatatccagccaagtctggaaaatggtttaattttattatttcacatgtatgggtgttttacctgcatgtatgtgtctgtatgctacatgtattacttgtggctatagaggtctgaagagagcatcaggtcccctggaactggagttacagaggattgtgagcagccatgtgggttctgggaactgaacgctgatctgaaagaacagctactgggtttttttgggggggggttgttttgttttgttttttttcgagacagggtttctctgtgtagccctggctgtcctggaactcacgctgtagaccaggctggcctcgaactcagaaatctgcctgcctctgcctcccgagtgctgggattaaaggcgtgcaacaccactacccggccagctactgttcttaaccactgacccatctcccctgtcccagtctaaaagtttttgaggactttagtcagcaatcataagccacaaaggcacacaccagagcagaaagatgacttctcccgactaaggtgtagctgtggcccttcaggatccccagttggctgaggctcccagactgtcccctcttgtgcccagggtttaagtagtagaagagctgttcctggcagtgacctctgacctctcccttagcacctggccacattcatcatggacaagagtgaggctattgcctccgtggatgacgccatccggaagctggtacagctgagctccaaggagaaggtctgggcccaggaagtcctgctgcaggtgaacgacaagtcactgcgactgctggatgttgagtcccaggtactggttgacaacagcaggtacagggagctgacggacagaggcagggccagatgtccagttcatccagatgtgtgtggcatgctggtctgtgtaagggaattgagccgaggacagtcagggaaagctggacccagctgagagtctgggccacttttggcaacctagactggcttagctctgcacctgctaggttgctaagcaaccagggcagcactgttctctggaagagccttgctgggtatcaagcgagatacggctgtgtcccagggcctatgctcgagggcatccccaattagtgtctatgtccctgtccatgggccaggtgtgggcagtgttcccgtgttacacctgtgaaagttacacatgtgttcctatctggggagcatatttcacataccgtgtccagaagaatccattgctggggtgtcagtgtgtttctcagccacatacatagcgttatttatcatgatggtagcctacatccacatccgaggcctgtcaggcaaggctgatccaccgtataccctcccacaggaagagctggagaactttccgctgcccactgtgcagcacagccagacagtgctaaaccagctgcgctacccctctgtgctgctgctggtgtgccaggactcagaccagaacaagcccgacatccacttctttcactgtgacgaggtggaggtaaggcagacagccaggggtgggcatgacgccatgccagttggccaagctgacttgatacccctgtgtctccaggcggaacttgtgcaggaagacattgagagtgctctggctgactaccggctggggaagaagatgagaccacagaccctaaagtagggccctgggggtgtagaaagtgagggatcttgcccttttgcttggggcacagtagcctgggatgtgagggcagcagggtggcagcatccagctggagggccatggccaggctaagctatgtcttcctctgccctctaggggacaccaggagaagatccgccagcggcagtctatcttaccccctccacagagcccagcccccattcccttccagcgacagccaggagattcccctcaggccaagaaccgtgtgggcctgcccttgccagtgccattcagtgaaccaggtaggctgagggatgggtggggattccatttgggatttaatggagaacccttcagcagctgctctgtaccccctcccccaacaggctatcgcaggagggaatcccaggacgaggagccacgggctgtgctggctcagagaatagagaaggagacggtgggtgcccagcctcccaagactcttttccatccttgcctgcttcctgttggcactgggtctggctcatggcggccagagtgtccccacagtgggtgggggatgatcatggctgacccctgctcccttttctaacctcagcaaatccttaactgcaccctggatgatattgaatggttcgtggccaggctgcagaaggcagctgaggctttcaagcagttgaaccagcggaaaaaggggaagaagaagaacaagaaggggccagcaggtaccaaccagagtgatagggaaggggctggaggatgctggggcaagaaacggtaggcacggggctggtgagttggctcagtgggtaagagcacccgaccgctcttccgaaggtccggagttcaaatcccagcaaccacatggtggctcacaaccatctgtaacaagatctgactccctcttctggagtgtctgaagacagctacagtgtacttacatataataaataaataaatctaaaaaaaaaaagtttaaaaaaaaaaaaagaaaaagaaacggtaggcacacactaagctggagggaaggggagtctggaaggggacagcaaccaacagcaggcactcagcgggggtccaaggctcacaactttccacgttttgccagagggtgtccttacacttcgggcacgccccccctcggagggagagtttgttgactgtttccagaaaaccaagctggccatcaacctgctggtgagtcagccccgccctgtgttgggggtgcgggtagggtgcaggcccacacacatgcacgcacacgcacatgccatctgtcacctgcttgttcttcccaccccaggcgaagctgcagaagcacatccaaaaccctagtgcagccgagctggtgcacttcctcttcgggcctctggatctggtgactggggctgggacagggcggggtcgggggcaacagagtgatccacatgggtttggggtggaggaaacgagtgcccaccttagcatactcaagctctgtctgggttcccaggaggccacagtccatccctgagggccggcctatagagctgtggtgggtgggggtaggctgggtctggtggctttggtgggctgggcttccccactaaactcactctgtctagatcatcaacacatgtggcagccccgacatagcacgctctgtctccagccctttgctgtccactgacgccgtgagcttcttacgtggccacttggtccccaaagagatgacactgtgggaatcactgggggagacctggatgaggcctcggtatggagaaggggcaagatgtgaactaaacagaggtctcaggtgggttggtcccagcagggcatgtgactgaccttctggctgctgaccacagctctgaatggccccgggagccacaggtgccactctatgtgcccaagttccgcagcggctgggaaccacccctggatgtcctacaggaggctccctgggaggtagaaggactggcatctgtgcccagtgatcaggtcagaactccagcccagcccatgcccacccctccccagagcttctccccagcccacccgtgcttctaccttcaaggcttctaaagcaacaatgtcttctaccccaacccctacaatgccaggtcaccttggcttaccacctgcctgggcatttggccctttgtcctcaatggtgctaggtcacagcacattcatcaagctgtgtcccttgtcccaagactgatcacagtcactgtagcccatccgctaccccacatcaagcccaggttccctgctttttccacagctgacccccaagaatcgactatctgtacgacattccccaaagcacagcctctcctccgagtcccaagccccagaggacattgcaccaccaggcagctccccacatgctaacaggtaagtccccacagtgtgagcaccacacaactgttgcatgtgggctacctccacacggtgtcaaatgccccattctggtataaaatagttattttccaaacgagaatccaactttctttttgtttttaatataattttaattcttattggaaatagcttatcatacaatatactctgatcatggtttcccctcacctaactcctgccagagcctccccacccacccacatccacactctttatttctctctcacacaacaacaacaaaatatagcaaacaagagtagaacaaaaccagcagaagggagaaccaaagaaaaagtacaaaaaagtatgaaaaattccataaaaacacaaaattggaaaccattttacataagcagagaactgtgatgtaaaagcaatgcccaacgcatcgcctgacagaaacctcaaaaaaaaaacaaacaaaaaaaaaaaaacactgagcttgatttgcgctagccaccgattttcttcttagctttgtctctttaatgatttatttgtattttatgtgtattggtgttttgcttgcatgcatgagggtataggatcccctggaactggagttatagacatttgtgaacttccatgcgggtgctgggaattgaacctgggtcctctggaagaacagctagggtttttaaccattgagctatctctccagcccctcttcttagctttgtaacatataattgaaggaaacttttcaagtcacatctgctttcaaaagtcttaatctatatcggtcctttttcccttccttccttccttccttccttcctttctttctttctttcttcctttctttctttcctttctttctttttttcttttttgagacagggtttctctgtgtagccctctggctgtccttcctggaactcactctgtagaccatgctggccttgaactcagagatctgcctgcctctgccttctgagtgctggttgcctggctacattacttctttctatactttcttgtttcataatcaatgttagaaagggacagagattggatgtggaagcccacacctttggttccaggactcaggaggcagaggcagacagatctctgtgagtctcaggcagtcaatggctgcatagtgagacgatgtcaaatttttaattaattaaaatcaaggttagaaactcactgaaggaaaaaaggaaagaaagaaacaaacaccaccagcgactcctccaagcaccacccactatggtgctgttggggattcagagcaaagggctctgattatcccccacacacacactaagcatcccacactccccgtgagttaaacagaagcccaagacatggaggtatccctcttacctccccctcctctggttcttactcctacccagggtctacctggtggtcctacggctccttttcaaagtgaacccctctccttgggcttctttagcttgctatccagtgtccctactgggatcatatgtatgggacattctcagcctatcaatacactgggcacagacctggatcccccacccctcctccctctccagtgccacactgaccaggaacatgacctggctaggggggaaaccattagccagagctcacccctgctccagagatgcaaggggacttccagaaaggacacataatatctctaaggggctgtaactgaaaatctcctagccctagccctgtggtcaactgggaacatgtgaccctgtcactccctaggcacacctcttgctctagtccctctgaggagcagggcaagagactccccaagatagtttgagctgggccagcctcttggagtctcgtctccccccccccccccccccccccccgcctgctggagtgtcacagtttccactcccggctgagaagcacagcctctcttcactgcaacctgggcagcagaacaggaggcagctgcagctgggaagcaggaagagacttccgtccagccctgggtctcaactcttcctggtcctgcaggggctaccagccaacaccagccatgaccaagtacgtcaagatcctctatgatttcacagcgcgaaacgccaatgagctatctgtgctcaaggacgaggtcctagaggtaaggaccggggctatacaggggaagtggggcgtgttctgggaccatggtctgtaatccacccatcttcccagtgtgctcgacctggcttcctactgggcctccagtggcctctctgacccccaccacagtctggctgagccactgagctgccttctgatgtctgggggatccctggaggtctaccgtggtgggtggcccttcggtagaagccagtaggggcttgtcattcatggccacccaagatcaccaccctggaccaacttatttgtgcctaacctgaatccaggccacctactgagggacagaaagtggagcaggctgggggaagctctgcatttagaatcaggttaagaggtaccctgtctccaggactggggaggccaggcaggcactgggtagcccatcaggccaagacatgtccagaggatggagagctgtgcttgagatacctggacaatgctttggccctctgtgaagggtttggcaagtgtccccagcatctgactctaatagtacttgaggtctgcacgaggatgttggtgagtctcacagacatctggacacttggcaggtgctggaggacggccggcagtggtggaagctacgaaatcgcagtggccaggcgggctatgtgccctgcaacatcctggctgaagctcggcaggaggacgtgggtgcccccttggaacaggtgatcgcctgccacggctccattctgtctacaacacagtcagagcccctaaggtcaggggtgcagctggtctcaatgtgatatttgaacctgatccccggaaacctgctgcccccaagctgggccaagggctgtgtgggttcctggggtcttactcaagggaagaaagggctggcccatccatctggggtcctgggtaagtccttatataatagcccccccctcaccttacccctcacctcttccttactccttgcagtctggccagaaatactggggtccagccagccccacccacaaactgcccccaattttcgcagggaacaaagaaggtaagtagatccactttggggttagaagtgtagggaggggcaggggagggcgctgataggatgcggagggtggggaagaggcagagaacgggtcgagtgaaggggctgagagcgtgcgccccacagagctaatccaccacatggacgaggtcaatgacgagctcatgaaaaagatcagccacatcaagacacagccgcagcgcaacttccgcgtggagcgcagccagccagtgcacctgccgcttaccttcgagtcaggtccggatgaggtccgcgcctggctggaagccaaggccttcagtgccaggtgagtcccgtgtgtacagccggtggggcggagcctggaggacagtgtcccgcccacggccccgccctcacacccacctgcccctaggatcgtggagaacctgggcatcttaactggaccccagctcttctccctcaacaaggaggaactgaaaaaagtgtgcggggaagagggcagtcgcgtgtacagccagctcacggttcagaaggccttcctggaggtgagcagctcctgcctgcttctgagttccttcctaggcacttgcacctggggtcactggaaaaacaggaaacagcagggccctgtcctgtaccctctttattccccaacctcccggctgaggcccaatctctttttcctagaaacaacaaagtgggtcagaactggagaagctcatgagcaagatcaggagggccgaggacagctataccagccaacacacttcaccagagtcagagggggcgccgcacctgtaatgggcccaacccaaatgcatggagtattatttttatatgtgtattattttataccaaggacatagatgggctgggtgtaactggcttacctgccctccaggcagagtcctgtgtatgagcctagctacacctgtgggtagctcttttaccacccgagccctacccccaacccaatactcttcttccaaaaccaaggccagcctcagccaaacctgtacctggcagtgccagtcccttctcaacctgctgccaaggccccaggactctcccggtgggcaaggcctcttcccctggtcttcttggtgcacatgaaggtccttgttccttacaatgctgggccccgactctgcagctctcccttgtgttgcttgtttctacattcacgttttcctgcatccgctgtaccccaattgcaggatgggcctgagccctcagctgaccagcctggtgtccttgcctacatatttgcccactcccttcacgctgctagcatcccaggaacaacctggtcaggggctccaggacaggaggccttgggtgacctgctggtatagagtatgctgtattctttcttctttgagacctaagaatgaaccagacataggttctgacttcaaatgtcccatcccacccaaagagcctgtgataacagatgtctctggctatttccaccagcctgttcgctggtgtctggtgcgtttcccagctctggatggagccccagacccagagatgagagtggggactccacagctatgtcaataaaccagatgtctcctagcaacttagatatctgtttcttggggtagaagtgctctgacacccaaactgcctcttcttcctgctccttttctctgggatagtgcattggccctgaactctgaatcgtcatcctgcctaagccttctgtgctgggatcccacttgtagaccaccaagcctggtcatgcccttcaaagatctttccagtagagagcaacccacccacacaggtagtgctttggccatgccaggggacacctctcacctccacacccatccaaaatggccctaaggacatttctgggagggactccagagggtgtctagacagcccaaaaccttccaaccgggtggctttcaaaggtcccattctgagtaggagcagagttcagctggcccaggagcatgaatcagagggagatagaggcactatttagaagactgttccaagatgagggaggtgtcaaaaagagacctggggcctgaaagacctcactgacaagttggagagagacccaggtatctgcctgactggccagagactttcctttgatgcaagcctttggtgccatctgctggtagctccttatacatctttgggtgactgttagataccttgtatctggtgtgaggactgtcctgcattccaaattgctagtgagtcaaatcctgacaaggatcacctgaatcctcaacgtactgtgccgagactgaggtgaagagactgtgcccctcaactaatccaccacctacccagacttggcctcaggtctcagaggctccagcccctcagctcagacaagccctacaggacccagtctttccagcagtcttctctccaagatggttggcgccacccttagggagtctccagaacctgtatctgcttcatctaaccctcctagcccttccccatctgcctacacttactgtggcttccacagagctgaggcggctccagaccaagcagcctcccctgcccaggagctctggactcctcactcccatgtgcttggggccccagctgaacaactggctcaggcctctgagttcttggaagttgtcccttcttctctcaagggccttctaccacctctaggtcctttttaaaaagtagagagctgggtgtggtaacatacacatttaattacagaaagcagaaagcagaggcaggagggagatctatgtgaattagaagtaggtcgacacagcaagttccagtccagccagggttacagagttaaaaaaaacaaaaacaaacaaacaaacaaacaaacaaacaagaaaaaaactgtcaaaaatctttacttttaaatattttttagattttcttgcttttactttatgtgtatgaatgtttgcctgtacatgtcctacatgtatgtacaccatatacaccacatgtgtgccgtgcccacaaaggccagacagattctctggaactggagttatagatagttgtgggtcctggaaccccaaccctggtcctctgcagcaataaccatccctaaaggctgagacagctttccttattaattctgtgaggcacaatctcacatagcacacgcctcatacttttgatgtggctgatggatggcctcgaaggcttctaggcaggcacccagtttaatgtgttgctggggatagaggggaaacattctgccaacagagctaagtcctgaaccctcagaacctttcaaagagaatagcagaggaccacccatcacaggcacctagtgaagagatggaagtgttacagccccagggcgagttagcttgggaccttccctaactacttactcttccctctttggatgtcactatccggggcctgcaaatgagagataacaaacaagaaccatgcagcaagcactatctctagcattgggtgacctcactctggtctagactaaagaatgagacacaaagaacccaggtcacctaggctggggttcaagtgcaactttcctaattataatacaactctccctgatccctacccagcaagtcagcaggaatgggaaaggtttgccctacctgtgggaacccagctgaagagggtctgtccataggttgggtagatttgccctggacaagaacgaagaatgaacttaaaacccccaaacctagagttggtttctaagctacttagccaataagctcttcgtgtgtgggactgctgtgactactgctctgtgcctagctccaccaccaacaaatatttccatgaacaaggcccatctctgtctggggacaagcatgtctttgtgatctgccaacctcctgaccacccacagcaggccattcaaacacagggcttcctataccactcagaagaggctttcccgtctttcttagaaaaagatataaaatagttgacttctcaaggtaattggaggaatgacagagaagctgagatgtcccttctacctgggtgacccagcacaagatgcacacttaacctggggacagtgatgcttagccaaagtggctaaatctctgtgcaaatcccatgaagggaccctggacatgggtgaatgccgagaaaatgctttttgtgtggagaagcagaaaggatctaccctggccctgaatgttcccctgggagtattgaatgcaacatgacaggcaaaactgtcaagtgtcagagagaaagcatggagaagatctgtagccaaataacttgtgctcaaacaagaagacgtgaatttgagttcaaagagacaatgtgtgtgtgctgctatggggcatggagcagagaggagtgatggccaagctatacagctctgagcatacaaagcctaagagtcgcttgccaggcatggtgattcgtgcctgtcatgttatcgtttggaatgctgaagcaggaggattaccatgagtttgaggccagagcaggcttatagtgctaccctgccccaaagaacaaccaaaacttcttttgttgatcaccactccccaaagtgctgtcaagagacacattgcacactgagtggtcttaagtgcacacctcactgtggatggtattaggggcacagctgcttaagaactttcttcagggtttgaggtacaggcgagtagcaggggaacagggagaagcacggggtcgagttcaaggaggatctttggatacttggttaggactcagcatccctaaggtgagtttcaaaactcagagagccctgctaggctttccacctacaggtcctgagcaagaactttctgaggggtcagagagatggttcagtggttaagagaactggtctctcctctaaagaagccgggttcagtttccagcacccttgcggcagctcacaactgccttaaaattaaataatataatatacaaaaatctttctgtaacttcccaaataaggcatttgaaacctcatcttcctgctttgagtgcaacagtggtgtgtatgtgtgtgtgtgtgtgtgtgtgtgtgtgtgtgtgtgtgtgtatacatgcttacatgcctgagtgcaagaagagtcagagaccagaggtcaacactgatttcttctctctctacattgggaagagcgggggggggggggggtagcagtggagattgaacctagaaccttctatatgctaagtgtcctgcttagtctttttgtcagctttacttgaactagattcatttgggaagagaaaacactaattgtggaagtggtccaccagatttgcatgtggacaagccaggcagtggtggtggcacatgcctttattcccagcactggagaggcagaggcaggtggatttctgagttcgagaccagcctggtctacagagtgagttccaggacagacagggctacacagagaaagcctgtcttgaaaacaaacaaacaaacaaacaaacaaacaaacaaatagaaatatttgcctgtgggcaagcctgtgagacattttcttaattaatgatggatgtgggaggtgccgtctctgtacacatggttctgagttgtataagaaagcaggctcatagcatttggaatacaggtctctcttagcttgaggctagcctgctctacacagagagttccaggacagccaggattgtatagacagatcagatctgtctaaactctgtgtgtgtgtgtgtgtgtgtgtgtgtgtgtgtgtgtgtgtgtgtgttagagagatggctcagtggttaagagcatttgttactcttacagaggacccaggtttgatttccagtacccagaagatggctttcaactacctgcaaccccagtttcaaggagtgcatcagacatagacatggtgcacatatatgcatgtaggcaaaatattcacatataaaataaaacaaatcttttaaaatgaagtaaaaaaaatctttttgaaagacagaaagcaggctgagcaaggcatgaggagtcagtcattaagtagcacccctccatggtggctttttctttagttcctccttagtgtggtggtttgaataaaaatggcccccgtaggtccatagggagtgacactaacaggaggtgtagctttgttggaggaagtgcgtcactaggaggtgggctttgaggtcgcagatgctcaagcctggccagtgtgtcactgtcacttcctgctgcctgtggaattcagaagtagaactctcggctccttctccagcacctgcatgccaccatgcttcccaccatgaccataactgactaaacctctgagactgtaagccagccccaattaaatgttttccattataagagttgttgtggttatggtgtctcttcacagcaataaaactaagacacttagctaccctgatcatggattggaacctagttgccaaatgagccctttcctcccaaagttagtttgggtcatggtgttttatcacagcaattagaaacctaagacactaatccagccctctaccactgctagatccccagacctgcccaccatattttctgagatagttctcgcactaaaactggagctcatttctttagctatcctggagagtgagaccttgggacccacctctatgcatccccagttctgtacttacaggtaggtcatagctgcagatgcctcacccagttttttatgtggatgctgaagatctgaactgaactcaggtcctcaatgttattgtgagctctgaaaaccaaacccaaggcgtcctgcatgctaagtaagccttgtcaactgagtgacatcctcaccttggtccttattttccttctctttctcttctctgtcaagccttctcatacctctcctcaggatgagggtccctgtgcattcttacaggtagacaacatcttgggctctcgaggctggatcccttcccaccgccagggcaatcctttcattttctgatgcagttcatgccttatatgacctctgagttgacctgtgtggtaaggtcccagctattcatctagcaatcacagttcaaagagacagtacctatgcaggctgagcaggtcatattgcagcaactgtgatcagaagtccttggttctccctccctcctaccttcctcctaaacatagcttccatacttcctacagccccaggctttggctacacctcttcctcctagtaaatagaagttaagggagagggctggaggcatggctcactgggtaagaacactgactgctctttgagagttcctgactgagttaaattcccagcgaccacatggtggctcacaaccatctgtaatgggatcgaatgccctcttctggtctgtctaaagacagctacagtatactcatatacataaaataagtgaatctttagaagaagaagaagaagaagaagaagaagaagaagaagaagaagaagtagtagtagtagtagtagtagtagtagtagtagttgtagttaggagagagcagtgatgaggacaaattcctacactcaccccaagagatcaagtcaaatactcaaatgggcccactcagctagagttcacactgggcctgtggggacctcacttacagtaccagtccctcacttgcagcaccagtcaggccagatctgtggcaggaagaggaagatggttttgcacaaaagaaaccagaaatctccagtttctctgtacactcgaaaggaatgcaacttcaaaacaaccatttaattctcccatctgttctacttcctcgttactggagtttttagggtcaaagctgggcttggccactgggcctaaatatatcaattaaagagacagtaataaaccgggcagtggtagtgcatgcctttaatcccagcacttaggaggcagaggcaggtggatttctgagtttgaggccagcctggtctacagagtgagttccaggacagccaaggctacacagagaaaccctgtcttgaaaaacaaaacaaaacaaacaaacaaacaaatcataagtaaagcagaccagtgatccctcacctccacagaacttggaatgcccaaaattcacctggaaagcatacctgcccaaggaccagcaaagttcctggaatgctgggagttgtagttcttggaaaataataacgcctcatgggaaaatagagtgatctttaggtttgttgtcataaaaagacccctgcaaaacatgtcttggggccattgtgctgggaaatcctagggagtggttctgatcattgtccatctcttggtcaatatttaataaattttgcttttcaggttagagagatagttcagaggttaagagcactgtctgctcttccaagggtcctgagttcaattcccagcaactgcttggtggctcacaaccatctataatctggtgccctcttctgccctgtaggcagactgctgtatacataataaataagtaaatctaaaaaaaaaaagaaaaaaaaaagtgtgctttaaatgtgtcccaaaatgatggttagcaaactgacttgatatttaggttcaaactgtggtctgagaaattgtcataacgccagggcttcagaagttcactttggttcccttatgccatggggtagctagtctatatcaacttggcacagggtaaagtcattgaagagaagggagcctcgactgtaggcaggcaatcctgtagagagcttttgtaattagtgattgaaggggagggttcccttcagaaacaggaagagcaaaccttgcaggttacgggttctatttgcagttaaggtggttaagactaagttcctgtttgtcctgtgttgattccttgcaagttaaggtttccatttgtaaagaagagtaagtttctgtttcttcgctctggtgaaacctgcttacaaccccattcgcaggagtaaacctagcctttgttccctccctttcattatctttctaaaaaacgtataacagccaaccctcctgcccctgtgaaccctctctcccattaaagggacttcaagaggccagaaggggctgctctctcaaatcccaacttagggtaagacagctggccagccggccagtcctgagtgcatccaaaatgcaacttgctttaactggacaaccttagatttggtcttttctccttgtgattctcaagtttagcatgggcccagcttgtgggtgatgccacccgtggtgggatgattgtcccaggttttatacaaaagcaagctgattagaccctgaggtctaatcaagccagtaagcagtgctcctccaaggcctctgcatcagctgcctcctccagttcccgccctgcctgagttccttcaggatgaacagtgttgtggaagtgtaagccagacaaaccggcgcctcctcagcttgcttttggtcatggtatttcctcacagcaataggaaccctgactaagacagcccaaaatgggattcctcacaattcttgcaaggtttttgggtgttttctttttttgtgtgtgtgttttgttttgttgtatttgttttttgttttgttgttttaaaacaaggtctattgtaaccctggtgtggtgggattctctagacaaggctggcctggaactctgagatccacctgcttctgcctcttgagctgggaccaatgtctgtggtattaacccggccagaattcttaattctttggagcacattgtttcaataatatttcaagtgcctgtacctcttatagtatcttcttatatatattatcttctgccaggataattattcccttcttttttctactgggtccatctcagcctactctggcttacaaaagaaatactaccttgtccctaggtatccttagggccaggtggtggtagagcatgcctttaatctcagaggcagaagcctgtaaatctctgtgagtttaaggccagcctggtgtaaagattgagttccaggactgtcagggctatatagagaaaccctgtctcaaaaaataaaacaaaacaaaaccaaaaaaaaaaaaaaacataaggccgggcagtggtggctcatgcctttaatcccagcacttgggaggcagaggcgagcagatttctgagttcaaggccagcctggtctacagagtgagttccaggacagctagggctacacagagaaaccctatctcggaaaaaaaacaaaaaaacaaaaacacaaaagcataagaccaaggtagcctcagggacttcgcaaaccacataagagcctgtgcatatatgattatgtgtggagaggcttacgggatggtgcatgtatagtaaacatcacgtcatataacctggatttttccaatatgtagttatttatacatatgaatgtcttgcctgcatctatgcttgtgcatcctggtgctcttagaagtcaggagagggcatcagatcccctgggacgggagttacagtggttggaagctgccatgtaggtgctggaaatcaaaacctgttcctttgcaacaagagctcttagctgccgagcctctctccagcccccttacttcagtttttattaagcttttattacagagagctcaccagagatgacagtttatagccaattgaatgtctttattggagttgggtggggtggtgtaccccttataattccagcactcaggaggcagaggcatgtggatctctaagttcaaggccagagcggtctggcttcttaacattgactcagactcctgcacagggttgttagtcacagggtctgttagtcatgcccctgacatgccgcagccctctttaaggtggaaggcacagagataagtcattatcctgaatgcttcctcctgagtcactctggatttcagaagccaactgattgttaaaaaaataaatccctaagatcaggactgagacggtagtttcaggcaagggcagcctgagggtataataaatataaggggaagttactcagggtggcaaggttcaacctgagacagactttctgttctgcttgtgtgctcagaagagctgacatttgcttttctcctaactcagccgatgactgtggcttctcccctggtctagtttgattggctagtctgaacactgaaaatgaaggaggaaggagaaagaggtcactcgctccagaccgtcaaattcctggaataatgtggagggccttgtgtaaacaaatgttttacaggatggagggattaaaacatttgcataaaaatcttacaaggtgggctggaaagatggctcggtggttaagagcactggctgctcttccagaggtcctgggttcaattcccagcaaccacatggtggcttacaaccatctataatgggatctaattccttcttctggtgtgtctgaagacagcatacagtgtactcatatatacactaaataaataaacaagtctttaaaaaaatatataaggtggtggggcaggaggaggcgataaaaatattagaattctatgtctaaaacgcaagttttacaatatttgaaaggaaagatagttttggtttgtttgttttttgttttgttttgttttgttttgtttttggtttttcgagacagggtttctctgtgtagttctggctgtcctagaactcactctgtagaccaggctggcctcaaactcagaaatctgcctgcctctgcctcaggagtgctgggattaaaggtgtggccaccatgcctggcagaaagatacatgtttaaggagctggaaagagtccggtcccccaagaaattccttttctcaaggttggacatttagacaaaagccacaatccccttagagacttgaagaaagttcctgcttgttaataaaaggcgggggctgagggagtaggggactcattctccttgtctggcaagaggaacacaaggctcttctattaacgtactactgtggtgcctgtaaacttgtgaaggttctaggctccctcagtccctgctcagaagcctcacaggatctcacaagcccccattcccatttaaccctggaaatctttcccccctagcttctcctcctttccagggaaattgccttagcaccttttcccttttcacccacggagcacctattttggtctctttaccacactcattttcattcagaaaaatccctcagtggctaagagcctttttctactctttaccacttccttgtctctttaattgacctgttgaggatcagtctgagccccttggtcactgggcctagcttgttagcgttgtcatggcccagcctgtgaccctgtcaattcaggcaaatgcctctttctgctcttcccagtgtggctacatagatggaatgtctcaccattccctgctctgtaattggcactgggatgggcggccacgcttagcctattgaggctaccacagcttttgtcctaaaaatccagttccaggctgaaatgggaagccttgaataaaccctgctgtgccactggctttcgtccagtgtgagaggtcaccccctcagccgttcgtccctgtgtgatcattgccacagatcacacctctggcacatgggacaccatggtaactggtacctactgggtgtgcaagttgtttcaggaagctggaaatcccttttgtctaactcagataggatgaaatcaccacactttacgacagacttagtgaccttgaatggcagagggtcatattccaccctggaaggcctttaacctgatagaagagaaatggattagtgaaattgatgctatattggatttactaagaaactggcttaggaaatattaagtcacacaaagaagaatttagcttaaaaaaaaagaagaagaagaagctgcctccaatatgactggaagatcatagcttccatgactggaagaccaggcttgttagaaactgtagaaaagggggctggagatggagagatggctaagtagttaagagcactgactgtatttctgaaggtcctaagttcaagtcccagcaaccacatggtggctcacaactatctgtaatgagatccgataccctcttctggggtatctgaagacagctacagtgtacttatatataataaataaataaatctaaaaagaaagaaactgtagggaagaacattttgcaccatagctgaagtttagggttgctgagagagtttctgctaatgttggctcactaagaccaacctccaattaggctccaccctcataccaataggagacatccctgacttaaaaccaaccattaggccctacccttatctaagaacatgcctcttagggacagctcaagggggcagcccagggtcacagccaccattaagtcctggtctgccattaagtccccagagttcttattaggaaatcataatcctgccaagtgggcaagatggacctgggtgacaactactggaaaagaacaacataggtatatttaagaataattctggcaatatctttgttatgtaaatctcccatctgccaattgtctagacttgtagtcgcctgcctattaaattgttcaaagtgtgacctggagccagaacctgaaggagacttaaagatgacagcttatgtgggctgtataagcctaaggcctacataatttgttaacatgttctctttcagaggctgggcctgctagtgcagcacttgggaggtagatcccttggcagatggacccctgtgaatttcaggccagccttgtctacatagtgagttcagggcggccatagtgaaactctgtctcaaaaatcaaaccagggctggagaagtggttaaaagcactcactgactgctattccagaggtcctgagttcaattcccagcaaccacatggtggcttacagccatctgtaatgggagctgatgtcctcttcgtgtgtgtgtgtagagacagctacagtatactcataaataaaataaataaatcttaaaaaaaaaaaaacttaaaaaaaaaaaaaaaacaagccgggcgtggtggcgcacgcctttgatcccagcacttgggaggcagaggcaggcggatctctgagttcgaggacagcctggtctacagagtgagttccaggacaaccaaggctacacagagaaaccctgtctcgaaaaaaataatataaaaagaaaaagaaaagaaaagaaaacaaaacaaaacaaagccacctttttgttccaggctggttttctcttttgaacatcagccagaacagtcatgtgctattatttttttttaagatttatttatttattatatgtaagtacactatagctgtcttcagacacaccagaagaaggcatcttatctcattacaggtggttgtgagctaccatgtgggttgctgggatttgaactcaggacctctggaagagtagtcagtgctcttaaccactgagccatctctccagactgtcatgtgttattgttaaagagctcttttaaaaaaaaattattctctgtgtggagtgatttctcactgggaagacatattaattctagaacagcaatcttcagaacacactcataactggagtttttaggtttaaagctcctgttctgacaacctcaataagctaagttctgctatcactccaacatgcaggtcaaagaaagtgagcattggcccggcagtggtggcgcacacctttaatcccagcacttgggaggcagaggctggcagatttctgagttcaaggccagcctggtctacagaatgagttccaggacaggcagggctacacagagaaaccctgtctcaaaaaaccaaaaaaccaaccaaccaaccaaccaataaaacaatagaaagaaagaaagagagagagagagagagagagagagagagagagagagggagggagggagggagggagaaaggaaggaaggaaggaaggaaggaagagaaagaaagaaaagaaagaaagaaagaaagaaagaaagaaagaaagaaagaaggaaagaaagaaagaaagagagagactaatgctgagaagagggacatgtgctcagtgtgaccacattaggaagagagacacacaaagggcatagtcacccagaatctgtcttccaggcactaaagagcttcgggtttaagcagaagagaaaagctggggcaagaggcattcccaattccacagtcctagtctgtgtgtggtcctggcaaggtggtctgagcaagtcctttacttaaggacataatgtggctctccatcacttcagctcccaggtgcagcctggccttcagggatattgctttcaactagttcctgtcttagcaggtttctcttcctggaatccaaggttataatggtcagtgagtaatgaagaaatatcactaccacctcataagcccgcacacacacacacacacacacacacacacaggaaaggctgagatcaggtaggctgaatgctctgctagagatataacagctgcctggaaactgagcacatttattgtgtacaggcaaagcaagaagcaggttaatctctgtaggggtccctgtaagggaacagcctagggccccaatcatcaggagaaagggaaactataattagtactttctgtgtacctgtcaacatctctactcagaccagaggaaggcctcgacatctcctgagcctgatcggaggaaggccttgcatctgcggtctgaggcatcagcctgcttgacgggactgtgctcctgtcaacaatactcactcagacaaggtacactcactccccatactgggggtttagcaaagacttatctctgtcttgaagaggataagatgggctagacagagactcctgagtgacaggctgaccactgcagaggtaagcaggtgactcgaggtaaaggagacagacatttactcttcatcttgaatctactaccaacataaaacagctctcacctcagagaataaaacggaatctactctgacccaaatatgagtgtttcaggattccaaggaagagtggtcacaggactctctgtagtcagaggatgaaagtcactggagagatgactgagtagtgaagaacacttcctgctcttccagatggcccacctttggtccctaacacaaaatgaggtagcttacaacagctctaggggggatctcaccacacacacacacacacacacacacacacacacacacacacacacacacaaaaccatagcttatactacacacacaaataaaaataaaattaaactcaaaaagaaaaaaaagagggctggagagatgactcagcagttaagagcattgactgctcttccagaggtcctgagttcaaatcccaacaatcacatggtggctctcagtcatctataaaaagatccagtgcctacttctggtgtgtctgaagatagctacagtgtactcgtatacataaaataagatctttaaaaaaaaaaaaaaaaaaagagggctggtgagatagctcaacgggtaagagcactgactgctcttccaaaggtcctgagttttaaattccagcaactacatggtggctcacaaccacccatcataagatctgacatcctcttctagtgtgtctgaagacagctacagtgtatttatgtataataataaacaaatctttgggctggagcaagcaaccagcgtgagcagaggtcctaatgttcaattttcaacaaccacatgaaggctcacaaccaaatgtacagctacagtgtactaatatacataaaaataaataaataaatcttaaagaaaaggaaagaaagaatgaatgaaaggaaggaaggaaggaagaaagaaagagagaaagaaagaaagagagaaagaaagaaagaaaccttcaagtcaggcagtggtgacaatacctttaatcccagcacttgggaggcaggggcaggcagatttctgagtttgaggccagcctggtctacagagtgagttctaggacagccagagctacacagagaaaccctgtctcgaaaaaccaaaaaagaaaaaaagggagggagggagagagagaaacagagagagagagagaaaaacagagagagagagaaaaacagagagaaacagagaaagaaagaaagaaaaacagaggctggggttgtagctcagttggtagagtgcttgcttgcttagcattcacaaagacctgggtttgacctccagtctactttacaatgggtgtgatggcacattgctgggatcccagctttgtttaatctcacatgaccccagcctcatgtttccccaccattccctccatctgtatctgatgtgatattgacatggacataaaacaagagtttcgggagctggtgagatggctcagtggttaagagtgccgactgctcttctgaaggtcctgagttcaaatcccagcaaccacatggtggctcacaaccatctgtaacgagatctgatgccctcttctggaatgactgaagacagctacttgtttataataataaataaatctttaaaaaaaaaagaattgtcttagccatggtgtctcttcacagcaatagaaatccaagctaaggcagatacattgacatatccatgccttctcagttgtgcttaactctatttctccactttatataattataactatagttcaggactcttgcctagggaatagtgctgcccacagagggctctgtccatctctaccttttttgttctgggatgtttataaggaatctatagatgccagctctggtctttatgcttgcatataaagcactttatcaaccatctccatagctccaatacagttcaataaaagttctttcccaggccaagtatagtggcacaagcctttgatcccagaacatgggagacagaggcaggtggatctctgagtttgaggccagcctgttcttcatattgagtccagatatacagagaaaccctatctcaaaaataaatgaatagctcttttcttcttcctcttcttcctcttcctcttcttcctcccccttcatccttttctctttcccccttctcccccaataaggcttcctctcccgtggggggggggggaaagataaataataaataaataaatatttaaaaaataataaaattccttccaggtggcacacgcctttagtcttagcatgcttagagacagatctctgtgagttccaggccagcctggcctacataatgacttccaggacaaccagggctaaagactatttcaaaataaataaaataaaactccttctaaacaacattgtccttttcccattcaccaaagttattaatgacaggtatagagtcaaaacttatgagaaatcagtattatataggtttctctgagcataaccaaatcacagcctttaaccgccagaaggagaaaacagagtccagcagggggtattttatgacactgccgtctacttcccattggcaatttaagtagtgttccgtttggtttcagcaccagatggccacgcccaggtatgagtcaagaggcctgttgtagacatgaggaggagcacaagaggcaactaccagggtccacacagaacagagagagggggaagctagagaggaatgaagcaggaggaggcaagagaggagccatgggccaagagggcaagagagcctgctaccaaaacagctgatgttatatcagattagaagctggagcaatcaaatcctagcccctagaagggacatgtctagggtaggggtgaggtgagaagtactgggaggagtcacaggtactgagtgagacttgtcccaggttttttttgagacctaacaagtagggcttagtattttttttttaaagatttatttatttatttattatatgtaagtacactgtagctgtcttcagacgcaccagaagagggcatcagatctcattacgggtggttgtgagccaccatgtggttgctgggatttgaacttcagaccttcagaagagcagtcgggtgctcttacccactgagccatctcaccagcccgtatttttttttttttttgtccagctacactgtattacagatcctttgaagactattcatatcatttttaaactttttaactttaatttttattatatctacttatttatagaaataataatgatgactattattattattggttttttgtttgtttgtttgttttctttgtttttgttttttttttcttgacaggatttctctgtgtagccctggctgtcctggaactcactgtagaccaggctgaccttgaactcagaaattcgactacctctgcctcccaagtgctgggtttaaaggtgtgcgccaccactgtccagctcttgttttgttttttgagtcaaagttttttggtatagccctggctgtcctggaactcactctgtagaccaggctggcctcggactcagagatccacctgcctctgtctcctgagtgctgggataaaaactacatggcaccatacccgacttattcactttgcatgtgcacatggtgagaggagatctttgttgtggcatacatgtggcagtcagaggacagcttgaaggaattaattctttccttccaccatgtggatccaggagactgatcttaggtctttagtgtgtgtgtgtatatgtgtgtgtgtgtgtgtgtgtgtgtgtgtgtatgtgtgtgtgtgtgtacacatgcatgttagtgccatggtgcaaatgtagaggttaaaagtaaaagacaacttgcggctgggcatgatggcacattcctttaaaccaaggactctgaaggcagagccaggcagatctcttgagttctgggccggcctggtctacagaatgagttccagggcagtcagagctacacagagaaactctgtctccaaaaacaaaaacaacacaaaaccaaaaagacagcatgcaggactcccacagagctctccctgctccacccaggctgcctgtgaataaactctttcttctcagcagtcatcctttgggtgtctggcactgagtagcatgcagtgtggcctgccaagggacaggacatatgccaggcaatgtactaagaaacaaggaagtgctccttcattgctttaagatttcacatggacagaaatgtcacctttgtagactcagatgtgccaccagctccagcaacttctagggttacaggagggtcaaaattccttctgtgaattttgtgtgcaagggaggaacaattttggtggttccttgagtaagcaaaagggccaggtatgaagtcctgaggcgctttcctcttccacctgtccaaccctgaccaggcaagtttctgagtgacaggcagactcacccagcaagatccctcttccctttttgacacagcacctctgcctccctcagcaaaaaggaactgagggccaagtgtggtcgcacaaatttacccaaactcttgggaagtggaggcagggctatcaggagttcaaggtcatcctcagctacatatcatgtttgaggctagcctggaatacccgaaaccaccctgtttcaaataaggggaggtgaagccagaaggcaatggggtacatctttaatctgagcactctctcttttatctatctatctatctatctatctatctatctatctatctatctatctatctatctatctatctatctaccctgactgtcctggaactcactctgtagactaggctggccgcgaactctgaaatctgcctgcctctgccttccaagtcctgggatcaaaggtgtgtgccaccactgccaggtataatctgagcactattaaaagcaaaagcagaaagatctctgagttcaaggccagcctggtaaacagagcaagttccaggacagtcagagctacatggaaaaactctgtcttgaactcaccaccaccactgaaacggggtggggaggatgagtgggaagtgatctagacacatccacttgttagctctgcttgctccaaagtgagcaagcagagcttgccgaggctcctctggctgcaaggtgaaggatgtgggccaacagcacacagagagaagccggtgtacctccaaacaagcctgtgcttatgctggacttggggttcccctcccttctcttggggctcccacattctgtttccaggagacagtgtaaatgagacgctttggagccacagccgcctcactgttcgggctttgtgctgcctgctatctcctccaagctcaatcccagccctgtgcacctctcagcctttgtgtgcaacttctgctggagcagtgtgaacatctactaaccccagagaagaaaccaagaacaacccccccaaaaaatgatcctacccaaacagagactggtggacccatgagttgattggggtcacttgcagattgggggtagctccaaagggctgcattaccccaaaagtcccacaccagtgtaggtgacctcttcctcaaatctgcaaggatggagcccctcttttagttaaccttccacttcctatctacttaagcatttgcatgtgggaagcgcaagggagggagagcttggctgtactcccttgcaggtttgataacctccacctttctatgttaacagaaccagtcaccggagaatacagattgggtaatcacaaatgcttccgggtgacaacagccgtattctacatgtagggcagacttccacaacacttctcctttcttccacccctacattctttctgcccctctaaaacttcatggctgtacctgttctttggacattgtgtggactgagttacacacatgcacatgcacacacaactgggttttttgttgttttgttttttaatgctgtggtgtgtgtgtgtgtgtgtgtgtgtgtgcactcgcgctatattccctggagctggagttacaggctgttgtgagctgctggaccctgacatgggtgctgaaaactaaattttggccctctacaaagtgcagtgggggctcctcttagctacccggtctccagcccccatttttacttaagtgggttcacatagcttcaagatgctttttctaactccaagccatggtggcgcatgccttttatcccagcacttgggaagcagaggcaggcagatctttgagtctgagaccagcttggtctacaggttggtctacagagtgagttccagggtagccagggatacacagagaaagcctgtctcaacctctgctctcctcactcccccaaaataaaccaaaacaacaaacaaaaggtccaataaagcacaaaggattctctctcttttttttaatcaattgctgtacagtgtgtgtgtatgtgtggggggggaatgaggcagtactttattcagctctctataatacataattgtttccccgagagctatcttgcatcctcaggctggggcactgtgcatctttctgtctttgagggatctggcagggtgggctattgttgctctgagattatgatctggcctcttgcaaccactgagattccatgtgtttgacaagctctgatccagcacaccatgagccacactgtgaggcacacagggctactgaaagcaccccaggctgagccaacaatctccaagcccaggagagaggaacactgaacactcagggcgggggtaactgcccattcatggacaagttcaaccctttcacctgctctgcttccagctccttagctgcctgtcttccctcttgcctagatacttctggaggctgccaggaattaaggcacaactgacctcaacggtcacccaaatttaaataatctgcacattgatatggaagcagtaagtcctcaccctgacacatggactctgggtatgctgagcgtctctttggggaccctcctaggaaagctactggatcagacctacagcccacaaagtcttcctccacagcatcgggcacagcaggaatcacctacacaccttagctgaatgaactccaggcttaccttgacttcctgtcaacctacccccaagactctagctcaacacaaggctccacacatttgctctccagggccctacacggtcccagttgtttcatttcctcgtgaattctttagcaccgtacatagctgatttacacgctagtctaaggcattcgaatccagcagagcccttcctacctgcaaagatcctgttccacaacagggctttgcagagctactaaagccatagacacatgccaaggtccccgctgagtcaacttctttctcagctctccagtgaatatagtcacatctgacccagtgaactgggcatcacacaccacctctcccatccccgatttgctcagtaatatcccccctgtccagtcctgggtattcatggggacctcagccagcaatgatcaagtgtccgtagcgacttctataaggcagtccttcaggaactgactgttccggtgtggcttccgattatgcagcctttgtctcaaggagggaggagcagaaatgttacacagcctctgttttcacagcactcagacggatcccgtccccacaccaatgcctgatacctgcaaccttacaacccaagtaggggtggggggtccctcgtcgcttttaaaaacgtttgttaatttattttaaatgttaaagatttaaaactttttattggttctttgtgaatttcacatcccaccccgttcccacccaccaccatcccttcatctcactcttcaccctttcagagaaaagaatattctcattgtggaagctgtagtgtgtcacagtgtgtcccacagcacacccttttgtccacacttctttgcttgcagatgttcattgcagtgagtcgttggtctggtacgaggcctctggcttctgctacaccatctatactggaacctcattgggacttctctagcctatcctgttggtgctgtatcatggagatcctgtagttttggatgtgtaggtctgacctcttcacgttttccagcagttcatccatggggtagatgttggggtgggccaattaaagccctggatctcagcctgagaggtatctaagctgtgagctgactctcctgctcctgcctctggctggttcacctgcactacccaccctcccaagtgatgtggctggtaaggaaggaacatgaccagtgctcccactctcaggaccccagggccagctctcctgcctgtcagagtaggtgaggaactagggaggggagacctgcagagcagaaaagagacagggccaattctcctgcattcacatcctaggaggctcccatgtccagggacagctctactgtgctgcccaggcaaggtgcagggcccactttcctgctttcatgatcccagggctaggtctcccacctgccccatgtgataaggggtgagggggaaggagggtctctctctctttctttctctctctctctctctctctctctctctctctctctctctctctctctctctctctctctcgtccacaccatggtacaggagacaagtaagtggcagggccagttctaccatgttcatacccttgaggccagatcacctttaatttcaccagtgggctgggccatctctacacagccctcagacattaacatgtcccaggtggaagcccagaccagggacatccatctggcctttggtggcaatagacccctgtggccaggaacccagacaatggccttggtagcagcacaggccaggacctctcccccaccgccatgttcccaggtggcatcaccagccacccacatcaggttgttccccactactgcccagtctccagtcctgcccctcttcacggaacccacatccctttgctcctccctctcctccatttctccacatccacctgctcctcccaatggcacctgggatctctgagtctctgggatcatctcagtgcattatggcactgggcaggggtcatctcgagcatggtctgccccctaggtatgtgcagctacaggctggtggtcacctcaggctagccccccactggtccccatgataagtatctggtgtttgtttcaggcttgctccttgtaccagccaactgagaggtcccatgtgagggttgtcacctgtcttgggctcactcctgcctgaggcctacagtcccaggcagggttcctctagtctggtggctatctcaggctagctctctgtctgggcatcctggaactggactggtggctgtctcaggttcgattttttttcagggaccgtcaggctatgaatcatttagatgttcacaggtcagaacactgagtaaatgtaccctctctcctctctgccatctacagaagcccacatggcacagtagccacacctgcaatgtccctaggagatgatgatacatttgaaaattttatatacttaaattttaaatttaatttgtttaaatttttttggggggaggggttcgagacagggtttctctgtatagccctggctgtcctggaactcactgtagaccaggctggccttgaactcagaaatctgcctgcctctgcctcccgagtgctgggattaaaggcgtacaccaccacgcccagctatgtttaaattttttaatttttagttttttatttttatgcatatgaatgttttggcagcacgtatgtatgtgtaccatatatttcctggagcctacagaggttaccctagaattggagttacagttgtgaaccaccatgtgggtactgggaaccaatcccaggccctttgcaagagcaacagtgtggttacctgctgagccatctcttcatcccctcatcgcttattttaaaagtctttccccaattcaggcagttcagaggcagaatattttctgaccattgatttcctgtactgagcacagttaaagactcctccccctgcacccctatctaaaccccagccatggattcccctcggctctgacggatagagttttctatgacttctaacttgctctctccctttcccattaattcttcccaggaggaacattttagcagagctgatttatagtgtttattcatcgcatctcccctagtcatacaaaacagagccaatgcctttagctcacttttaaaaatgttcattcgtctttattttatgagctttggtggtttgcttgcatggatgtcaagaggcagaccccctggaattagagcgacagagagttgtgaacccaggtctatctggaagagcagccagtgctcttaaaccactaagccatctctccagcctcagccttccactcattttctctcccccgtcccccctagcttttcctaccagttcagatgctagtgtggaagacagcatccatatatcttttccttaacatgatcgcattctagacagctgagtctcagtgttatatcttatcagtcctacagcaaagaccattgaagcaatgcctcagcatgcacgctcctcatcctgccccttactgttttagagttattactgctgtggtgaaacaccacaacaaaaagcaacttggggaagaaagggtttatttcactcataagttcacattacagttcatcaccaaaactagtagggtaaggaactccggcagggcaggaacctggaggtggaagctgatgcataggttatataaaagtactatttactggcttgctttcttatagaacccagggaccatcagcccaacggtagctcctcccacaatagattgggccctcccacatcactcactaagaaaatgccctacaggcttgcttccagtcttacacaggcatttcctctgtagaggcttccttctctcagaagactctagcttgtgccagattgacttaaagctaggcagcacacttacatactcctctagacactgtaatatatcttctatttcatgtagtttgggagtgtcctcacagagatgtggtggatctcatttattatggaggcatgcctctcttcataccaaggtcctcacattacagcttaggctgtcctgaaatccatgtatagtacagactggccttaaacttgtggtaatactcctgcctcagtctcctaaggattgagattataggaatgagccaccatactgagctaaatctttttttttttttttttttttgcttctagttcagtgttttttgttgatggtggttttggtttttcaaagacagggtttctctgtgtagccctggctgtggctatcctggaacttgctctgtagatcaggctgagttagaattcagagatcagcttgcttctgcctcttgagtgctgggatcaaaggcctgtgccatcaccacccagctttagttcaatgttttattacccatagcaaggctaaagcaacggccaccacagcacagagataagctataccatactgtgaagagtaaaattgccttatcagacttgacagttcactgtcagatggtttaggttcagttacatgtctcatgtcctcatccccctgttgtgagagtactctgggggaatggggacaaatgtctgttcactccagacatggaattgagaatagatcaaagtacagatagcttcaaagtccaacttggttttattgaggtacttacagaagcagaaatgactcaaaggcagctgcatcaccacgggtcaccccagcatgggtgataacacacaaaagctgggactccggagggtgatatacatcctgcaaagagctcaacaggtgggagaatgtcctttccaggtggctcagttggtctgagcctcttacaggaagctttgctggtctttgtttcttctaggtctctgcttcttccaggaagctgggatggtgagagggtgaaagccttaactgcttataaatccccctctctgatgacattaaactgctcagcttctgggacttcttgaagctattttgaatttacttcttgtcttactgagcttccctgcagactgaaatgataacacccccatagcaagaactgcttctgtgtcttccaactcactgtagattctacctattgggctagtgagtgttgtgtgacttctgaagagattccctctgacagcactatcctgaaccaaactgccaccatctttatcagatcagctgtgcccatttgcaaaagagcatcgtagctatgcttgctgaaggttggtggcgccttcataggaggagagggtggattagacgctcacctgaatatccagtcattctctccaacctgttgtaattcaactctaactgcatgggtctcagatcccaaaagggtttaacgtatataggctgggaaggactagggaactccatctgtgcagccatgagaaagccatcatccatgggggatgcagactttccagtgtggatgcagtgggcttaaccatgctcttgtcaggaaccttactctgtaagaaaacctgataatggggctggataaatggctcagcagagaagcgcactggctgctcttgcagaggacctgggctcacttcccagcacccatgaggcagctcacaactgtctgtagctccagttccaggggatccatggcaccaggcatgcatgtggtacacatatctgtgcatgcagggaaaatacccatacacataaaacaaaataaataaatctttaaaaaaaaaaaaagcctgctgggcagtggtggtgcacgcctttaatcccagcacttaggaggtagaggcaggcatgagttcgaggtcagcctggtctacagagtgagttccaggacagccagggttacacagaaaaaccctgtctcgaaagacaaaaacaaacaaacaacaacaacaaaacccccaataattcattgctttcccaaggggaactctggtagactcaaactttattttttgtcactggggccttacaagggaggagtaggtgggaggtagtccctcaactcaaggcaataattgtctcaacagatatgaacaaacacttaccctaattagggcactgataacagaccaaaggaacaaccgagtccttgttcagcttggggaaccagtgaatgattgtcacaggagcataggtgacacaaacatctgcttccccaacaatgaccaccctgggataggtggtgacttcctgaaagctgataggtggagcccccttcaattagcctagtcctctagcacaatggttctcagccttcctaatgctgcaacctttcaatggagtcagttcctccttttgaggtaactcccaaagataaaattatttttattgttactgcataactgtaattttgctaccatgatgaaccaaaatgtaaatatctgatatgcgggctatctgatatttgaccccacccacaaccacctctgcaaaagggttgtggcccacaagttgagaaacactgccctagaggcagcctctgtggcccctagtatataaaagtccatcttccagtgaacttgaatagagtcagctggagccaagtatggtggcccctgcctgtaatctgagcacttggaaggcaggggcaggaagaccaagagttcaaggccagtctcctttcaaagaaaaatctatttttaaaagatactaaaaaaaaaaaaaaaaaaaaaaaaagtgtgttggttacttttttttgtcaacttgacacagctcggattttgcaggaggagggaacttcgaatgagagaatgcctctgtcctcaagattagcaagtcagtcggcaaggctttttccctttggcgagtctggagctccctatgtaaaccaggctggccttgaatccacctgccactgcctccagaatgctgggattaaaggtctgtaccaccttgcctggctccgtttttaagaaaaaattaattttaagattaatgattgataagggaaagcccatagcaccacggtgagtggtgccatccctgagcaggtggtcctggaagttcagggctgtaaagaaaggaggctgtgcaaaccaagggaggcaagccggtgagaagttttctccaggcgcctttcttgcagtccttgagtgatagattgttacttgggagggtaaggtacaatcaacctcgcctagttgctttgggtggtggtgtttatcacagcaatagaaagcaaactaagacgagtggtaaacaaaatattaacagaaaatatccggcatacacatatatgtgtaatagcttgagccagcatattcaaagaactgcaaatcaataatgggaacactgtaaaagaaactgcccttactatttttattcatgactgaagattcaattccccatctcaactttctcaaactgctgcttattccagacagacttccagccaggggagatgcaaaatcatgggcaagggaaggatcacccagcagcttaaggcaacaccagaaccactccatctgggaagcggaaactggtggctttgccagaagtcgcccatggggccatacacctgtattgattctcagactgtgctttagcttgtctgcctgtaagcaggggctgcaccgagcttgacttatcgcgatcagcagagagggcgcagctcccagtccctaaactgggagtaggggagtcccacagctggagaaagggtgcacttctgaagcccctgtagggaatgcacagttggaggcaaggacccgctcaaggattagcatgggtgtggagcgagagcgctgccacccatccatccgtagtccgtggggtctgaggcttactgagcgcgcgtctcagtagaatccgttgtctgttcattctacgcatccgagctctagaggggtacaaagaatccactctccttggactggtagaaactaaccactcgctactggggaagagaactccgaccgtgacacggggcgtggtctatggcaaggtctccaagtacatgggcggggctcgtcgtcaggcttcatttagctttgctttgattggccaggacgcgcggggcattgtgggttagcacgcaccggctaccgcctcagctgttcgcgtttcgccatgtcggggtccccggtaaagcgccagaggatggagtccgccttggaccagctcaagcagttcaccaccgtggtggccgacacgggtgatttcaatggtaagaggacgcggtgcatgcgccctatttaagctgctgcgcccccaattttggaaccagcaccggtgtgggtgtcaggggcggggcctcgcgggcgctggagctgggattggtgagtttgcggaaccttcaaggatcaatagctcctgggctattggtgaccctgggagcccggcgcgaagcctcggtgggtagaggtagtccgagaaagtctccctgacccggggtgcccccacccctactcccaattccctacgatgacacaggctcaactttggagccagtgcagtctgcaagactggacaccatctgctttttgcagcctgttgcactggttttccacatgcagctggttactctctatgggcagtacacagcatggctggagtcagaccagttgcacacactaaatcaaatggttatcattgtcatacttccttctcttttgagactgggtctcacagtgtagccacaggctgttctggaactcctggtaatccttctatcttagccttagtgctggatcaggcagtgccaccatgcgcagctccagtactcagattttcctggacttggtagggacgcggaaaacaggtggaaagacttgtgctgttagtcttgctctcatccttggagggtggtggaggtgatctcacatgtgctgtgagaaagactttcaggaaatgctccgtgtgagctcagtacaaaagcacttctgctcttttctgctttctcacggtgacttgagaaacaggctttaattcctcatgagtaagtgcattgtttatctctcagagagtcgcagagagtgattaggcatatttgggctgcttagctataaaggacagacttgatgtgggtctaatagcaaacccgtctgacacaagctgtgttcgtcagcttccagaaatccatctgggagtcctaaggtttttccactgtgtgtgtagtgcagagtttaccggctaatgtttgtgaagagagcaagagacaggcatggtagctcacacctgcatttgggaggcagaggcaggcacatctttatgagttggaggccagcctgggctacatggttccaggctagcctgagctacatagtaagagcctgtctcaaacaacaacaaagagccaaagagcacattcattgacagtgtggcttaaaacaaataattataaacattgtcagattcaaaatctattttatatactttatttattcaaagtcttttttttttttttgtcagatggtaaaggtttcttttggtgtttatttgtttgaagacagggtttctctgtgtagccctgactttcctggaatttgatttatagaccaggctggcctcgaactcacagaaatctgcctgcctctgcctcctaagtgttgggatcagcattgtgcaccacccctgcccagctgtggtgagggttcttcaccccttgggtatcacaggctcctgaaaatagagtttccgaacgcttttgacccctttcattttcctctgaacctcagggtctttgggccttaatgctcagctgggggtggggtggggaggagaggggaggggaggggaggggaggctagagctcaagctctgacatcacacctgctaaaacagctgccactcaactgtgtccccagccctgggtctgtagggttttttgtttgttttgttttttgtttgggtttttttgtttgtttgtttttttcgagacagggttctctgtgtagccctggctgtcctagaactcactttgtagaccaggctggcctcgaactcagaaatccacctgcctctgccaccactgccctgccagagtctgtagttttatatgataaaaactgtgttttctgtgcacccttcagtggattcacacctcagccagcaccactccagagcacattttcccctacttacttcttattttgaaataacctcaaactcctgagatgttgcaaaagtagcccatacaccctttgccccgtttccctagtgatgtccaaatcaggaagcaagacagcagaacgagccacgcattgcgctgcctgcgggctaggcctgctctggttatctctgcagctgtgtcataactcatagacttaggctgtcaccgtgacacagagctatccttgatatcaaaagacattatgtgcctggtggtgcagacctataatataaccctaacactggggagcagggcaggaggactacgagtctgaggtcaccctgtgttgttagctatataggatcctggtatgaaggtctggaaaagaaaaagcaggggtgccaggcgtggtggtgcatgcctttaatcccagcactcaggaggcagaggaaggcggatttctgagttcgaggccagcctggtctacagagtgagttccaggacagccagggctatacagagaaaccctgtctcgaaaaaccaaaaaaaaaaaaaaaaaaaagaaaaaaaagaaaaaaaaaaaagaaaagaaaaagcaggggtactttgaaattggcaagctcatgtcctcctggcctggcaactggacatctgtgcatctgctgttcatgtgcctgttcatttggataactgagttgatcctgaagaaaaataaccaatatgttaaaggagccaaaacacatgggcataatatggcgggccccgccccccacaagtgaggttaaagagacaaaacatgtctgccagcggtttcaggttagagcgccccctgctggctgtcgggcagtaggacaagcttgtggagcatgtttttccagcatccatagttccagtcctagtgactgcacatcggcttttatagggaatgatggttctagggtgcttagtttttgttgttgttgtttgtttcttttgttttgttttgttagatagtgtctcactgtgtaggcctggctagcttggaacctgctatgtagaccaggctggcctcaaactctggattgttttttaaattttactatttaaaatgttgcgatttttttttttttttaaaaatcacatactgaaatggtttgtttgctttattttgagacataatccaatgtagccctgattgtagacaaagtaggccttgaactcacagatttcaagacacaagacctatgtctgtttccagagtgctgggattaaagccatgtgccaccacaccgagcttctggtttgttcttttgtgacaaggtcttgctctgtaacccaggctgaccttaaactcttagttatctgagctaggatcatagtctgtggccagctcatgtgtgtgagctgagtactgtcttcatgttcaaggctgctttgtggctagcctctggagctgctgtgagcattgtcactgtgatccacttgggattgctgcagggcactgttttccatctctggtgacagctgcttctggtcactctgacaaacacctgagagaaaaaggtaagagagggatggtttgttttgacccagtgttctaaggtttcagttcattgtggtagagaaggcacgggtgatgcagagcgtctcctctcatggccgacaggaaacacagagagaatgtttgtgctagcaggctggctccttttattccgtgggacctctagtctataggataggctatcccttagctaccctcttgggaacacagacaagccagaggtaactagatctagatgcttcttggtccattccagcagacaacaagattaaccgtcccatctgcttttgaatttttcttacctagccatcgatgaatacaagccccaagatgccaccaccaacccatccctgatcctggctgcagcccagatgcctgcctaccaagagctggtagaggaggccattgcctacggcaagaagctgggtgggtgagtatggctgatggagagcagagaagatcccacacctcagtctcactgtgtctccatggctctgagtcttctcgctatgggcacctccagctgaggtgtggaacattcatgaacttccaggttccagcctctggcaggctcaatagttctggccctttgccttctggttgcccttactttctttcttcagctttttgtttttggttgggtttttgttttgatttgatttgttttgtttatttactcattcattcattcattcattcagcttgggtttcagagacagtttctgtgtagccgtggagatcctgaacattatttagaccaggttgcctcatagagatccacctgcctcttcctcctgagtgctgagattaaagggatgtaccaccttgtccagctgccattactttttaacaagtctaatggatgtgagtaaagtgtgcgttgggacagccattaccacaatctactcctccttctgcctccttgtcagtgttcttggcttctttcttgtttgtttgagacaccaggcattactatgtaaccaggctacttttaaccatgcctgcccaagtgctcagataacattgtgggtcactatgctggcctccaatctttcttgttcctatagttttatctcttccaccttatcacatggatcataaatgtgtagtctttttttatatgctaattacacatctttatgaggtatgttgtgataattttatactgtaaacaacctgtggtcccatcagtttggttggcatctcactctcctttcttgagagtattgtttcttggggttgcataaaaaattaattttgccaggcagtggtggcacaggcctttaatcccagcacttaggcagaggctggcggatttctgaattcaaggccagcctggtttacagagtgatttccaggacagccagggctacacagagaaaccctgtcttgaaacaaaacaaaacaaaacaaaacaaaaaaagattatgcagatgccaaaggatagtttagtctgaaagatgaaaaagttcttggtggtgcatacctttaaacccagcactcaggaggcacagccaggtggatctctgagttagaagccaactttgtctacaaattgagttttaggacaaagaggactacacagagaaaccctatctcaaaaacaaaaaaaagttatggggctggtgagatggctcagtgggtaagagcacccgactgctcttccgaaggtccgaagttcaaatcccagcaaccacatggtggctcacaaccatccgtaatgagatctgactccctcttctggagtgtctgaagacagctacagtgtacttatatataataaaaataaataaatcttaaaaaaaaaaagttatgaagacgaaggtgtgattcccaacaatgtgatttgttgaacaataaacttgaaatgtttccgatgtcatggtttatgagatagcgggttcactataataaaacagtggtttctctctctcttttttttttaagatttatttattttatgtgcatacactgtagctgtacagatggttgtgagccttcatgtggttgctgggaattgaatttttaggacctctgctcgctctgatcaattttgctcgctcagtctctgcttgctctggcccaaagatttgataccagaagagagcatcagatctcattatggatggttgtgagcctccatgtggttgctggttgctaggatttgaactcaagagcagtcagtgctcttacccactgagccatctcgccagcccagaacagtagtttcttttgagtctgccttccctgccttcctttctttttcccaggctggcctcaaacttggaaccttcctgcttcaccctttgagtactgtgtgtgctttgtgagtttgagaccagcctgctctataatagtgagttccaggacagccagggcttaatagggagaccgtgtctcaaacaaaataaaacaaagtagcatgtgcttttatacccatcctggggagggtgaagagaacagaaatttggcaagagtcagaattggtcttataggttaccccaacgccttcaaagtttctttcttttttttaaagtttatttactttatgtatatgaatactctatctacgtgtatacctgcatcccagaagaggacctcagaactcatcatagatggttgtgagccaccacgttgttgctgagagttggactcaggacgtttggaagagcagggagtgctcttaaccactgagtcatctctccagcctgccttcaaagttgctaacacaactttccccttctgaattcaggcctcaagaggagcagattaaaaatgccattgacaaactttttgtgctgtttggagcagaaatattaaagaagattccaggccgtgtatccacagaagttgatgcaaggtgtgtggggtcagtagggagggagcaggttcctggtggcatcaggagcatcagtttgcccttgagatcccccacaatcccttggtgctgcaatacacattctattagaggactgtagagaactggtgttctagagctttctgactaatggctggtcttgagcctgtgtcttgtgaaaatatacttgcactaaagggtccagaaatttgctcttttggttgtcaattttttgtgttttgagtctcactgtgtagctccggctgtcctacaattgtagatcaggctggcttcctttgaactcagagacctgcctgcctttgcctcccgtgtactgggatttaagtaatccaatcagcctggcaatttttttttttaatttgttgtgttttgtttgagattggatttctctgagtagccctggctgtcctgcaacttgctctgtagaccaggctggcctcagactcacagagctccacccgctttacctcccaagtgcagagagattaaaggcgtgcgccaccgctgtctggctcttaaatttttttttttataatttttaaatttttattttatgtgttgttatttttgttatttaatgtgtgtgagtgttttgtctgcatgaagagcctgtggtaacctgagagggtattggatcccctataactgatatagatagttgtgagccaccaaatggatgctggaacttaaacccaggtcctcttatttattttgagacagggtctcatgtagcctcggatgacctcagactcactatgacctcagatgacctcagactcactatatgtcgctgagaatgaccttgatgctgtggtcctcctgccctcgctgctggaattacacaagtacaccatcagccaggcactggtggcgcacacctttaatcccagcacttgggaggcagaggcaggtggattttggagatctttttgatagatcttttcctatcttttttgttggttttgtttttgtttttcgagacagggtttctctgtgtagcccgggctgtcctggaactcactttgtagaccaggctggcctccaactcagaagtccgcctgcctctgcctcccgagtgctggaattaaaggcgtgagccaccacacctggtgagaaaccctatcttgaaaaaaaaaaaaaagtacagcatcatacttatacttagctcgcgtgatgttggggatttgcgctttgtatgtgacaggaagtgcttgaccaactcggcatatccatgaacccatttttctgtttgtttttttaaaccagagtctctttttcacaaggttgttacttttatgtgcatgcatttgtctgtgtgatgtattcacaccacacatgtgcctgatgctggtggaggccagagagggcataagatcctctggaactggaggtacacaaagttgtgagctgccatgtggaggctggcaaccaaacccgggtcctctgcaagagcagcaagtgttgtcacttgtagcacaggctgatcttgaacttgtgattctcctgcctcagtctcctgagtgctggttatgaggtttggctatcacgcctgcttctgaacttaggtctcaggttgttgagtccagaggaggggtgggaaggctttgcccagtgagccccccggctgtaggatactgacacgctctgacacgctccctttcttccaggctttcctttgataaggatgccatggtggcccgagccaggcgcctcatcgagctttacaaagaagctggggtcggcaaggacagaattctcatcaagttatcatcaacctgggaggggattcaggctggaaagtaagtgtcccctgcaggcaggcagcttcagattctctctgttctgagcagtaggcaccagtttctgggggtccttgagagaagcctgtgctctgctccaggggcagctcagactgtgcccttgccggttaggaggagtgtcttgctctcactgtgtctcagtttcctcctggagcagtgaggtctaaattatgtaagttttaaacagattatcttacatgtagtatgctctaagcggaagagaatgcaaaatggcagaacggtcagactcttcagtgatgcctcttccaggagtagtcagtcctggctgtccagcagagacgctcatttcctctctgccccccctggcccctccaccacccagaaccaccgactctccttcacttgtctgctctggatatcgtataagtagaggcaggtgacgtgtgaactcttctctcctcagcgtgtcctagtgtgcctttgccttacttcctgtcaggacagtattccattcagcggatcatggcatggccttgcatctgtctcttgttgggcattgggcctgttaccactttgaggctgtttgagattagtgccatggacacgggcctttatatattttggtgcgggcatggctttcctttctcttgggcagatgcagagaagtaggtttactgggtcatgtagttagtataggcggagactctctcctctgctgagccaatgcggtataaactacacttgtgcttagatactgaagtagtcacatggtggtggcacctccgaagcacccctgggaagggaactgtggcaggggtgtatggcccaggagtactgagccaaggagagaaactgcttgctacagggtaactccaggcagaactaggtcccaatcacccttggaaatgacccattgcttctagcctaggagcagagcccatagtaactctgagaggagagggaccctgttatagtgctggagcagatgtggtccctcagggccacatattgcctttgtctgctatgcagtacagatctgatgaaggaaatcctggtcagtccttgtccagacccaaccctgcagagtctcaggcttgttcttaacagtgcacagccccgttcctcctccacggcctcgcctgaggctgcactcagccaccctgcccctcttgtccacagggagctggaggaacagcatggcatccactgcaacatgacactgcttttctccttcgcccaggctgtggcctgtgctgaggcgggcgtgacgctcatctctccctttgtggggcgcatccttgattggcatgtggcaaacacagacaagaaatcctatgaaccccaggaggaccctggtgagctaccctttcaggtcacagactgggtggggtgggggaccaagtgagggtggggtcagacagctcaggacggctctagggcctttgtggaacatgcctgggtctcctccaggggtcaagagtgtcaccaaaatctacaactactacaagaagttcggctacaagaccattgtcatgggcgcctccttccgcaacacgggcgagatcaaagcactggcgggctgtgacttcctcaccatctccccgaagctcctgggggagctgctcaaggataacagcaagctggcgcctgcgctctctgtcaaggcgggtaaggccaagggtgaaggttggctagccctgaggggagacgcttagcttaggcctgagggacagtggtgagtccacgggtgaggcaggcatggagagctgtggtatcccccagcccagaccagtgactcggagaagatacatctggacgagaaggccttccgttggctgcacaacgaagaccaaatggccgtggagaagctctccgacggcatccgcaaatttgctgctgatgccataaagttggagcggatgctcacggtgagttcctgagtgggtgggcagctctgggccttttctttcacccaggggcagagtttgggcagagttgaaagttactgtaggagcctggcatggtggcacacgcctatagtctcatcactttggagagtgaggcaagaaggtcacattcagtagcctgggccaggaatggtaggtagcataggcctttagtccaagctcctgagaggcagtggctgtcctaagaacaacaatgatacacaaacacacacacacacacacacacacacacacgggggggtgggggggtttcaggagaggatatatgtgtggtgggggaggggatatgaatacatgtgtgaatgttttttttcttgggaccttggtgggtcttggctggggccctcccatgactctggctctggtcatttccaggaacgaatgttcagcgctgagaacgggaagtagtgcaacacccgaggccccagtcctgcaccgaggctgaccccagacctgcactgcctttgagctgggtcctaattgcacatggcttgtgacgaatgaatcttgcattttttagtgatcggagaagggatggatcataggattctgattttatgtgaaattttgtctaattcattaaagcagttgcttttcctatgctgtttcatttcaccgtctttgtcaccacccgcctaagtaccagttgccccggtgttggctgtgactgaggctgagactaggagatgaaccccaggccatcagcatgatgtcagcagttgtggtcctcacctccatcttctaagtcacagctgggacgtgagatggcagaggtcattgtttttggtgctgggactctatccaactctggcatcctgctccctgaaatagaagtagtcccccccccgcccccccaatcacccaagaggctagtagtaccttggcgtccacctagcctatgccaggctggaagttaagagactggctcagggtcttaactaaagctggagctcctggcccatcatggagtccctatgccctgcctgttcttacagggagcactagcagagtttggagacgaatgctgggctctgctcctggaggacaggcaacggctgaccagagtgctacagagccaggcctttccactgcccaaggtgtccagcattgtccttccctcatccaagtgttctgcctactgtggccaggttctgaagggcagtggcgccaccttctgggacagcacagtatacagcatcagttttgaaagggcatggaaccgtgcacatgcctgtaagcctagtacgtgaagacagcaaccagactgtccacatctgaggagagcttggtctacttagggagttccaggactacaatgaaaccctatctttttttgggggggcaggagggcgggggagtgtttcaagacagggtttctctgtatagcccaggttgtcctggaactcactctgtagaccagactggcctcgaactcagaaatccgcctgcctctgcctcccaagtgctgggattaaaggcattcgccaccacagcctagctgaaaccctgtctttaaaaacaaaaatgaagggctggagagatggcttagtggttatgagcatcggctgctcttctagaggtccagagttcaattcctagcaaccacatggtggttcacaaccatctgtaatggaatctgatgccctcttctggtgtgtctgaagacagctacagtgtactcgtataaataaaatcttatttttgtataaataaaaattggggctggagaggtggctcagtggttaagaatactggctgctctttcagagtatctgggttcaattcccaacagctcataaccaactataacccagttccagaagatctggcaccctcatgtagacatgaggcaacacaccaatgcacataaaaatcttttaaaaataaaattagcagccggtagtggtggcacatgcctttaatcccagcacttgggaagcagaggcaggcggatttctgagtttgaggccagcctggcctacagagttagttccaggacagtcaaggctaatacagagaaactttgtttcagcaaacaaaaacaacattaaataccatgtgtatatgtaaatgggcatgcacaccagggcacacatgtttaagtcagaggacaactttcaggtactgtttttcttctttccactgtggattccatggttcaaactctagtggggtgctttcactggctgagccaattggccagccccttttcatcttttttaaaaattttttatttatttatattatggatatgattgctgtatctgcatgtacacctgcatgccagaagagggagggcatcagaccccatacagatggttgtgagccaccatgtggttgctgggaattgaactcaggacctctggtagagcagccaatgcttttaaccactgagccatcgctccagccctcatcttttgtaagaattattttatgtgagcacactgtaactatcttcagacgcaccagaagaggtcatcaaattctgttacagatggctgtgagccaccatgtggttgctggaaattgaactcaggacctctgaaagagcagtccatgttaactgctgagccatctctccagccccacctcccttttcatcctttattgtaattctgccgtccacatctgtgtaaggtttcatctcttgagctgttgttctactcagctgctacttttccagggttttcattttctccagcctgctgtcccctcctcctaggccctggagcaaagcctgatactatcagagcccacctcacctgctacagccatgggaagtcttagtatagactgtgaagcttaggtgggcattggtggcccatgcctttaatcccagcagtcctgaggcagaagtgtgtgggtcttcaagtttgagggcagctgcctagtccacaaaaaagagtagccaggccaggcatggtggtgcacgcctttaatcccagcactcaggaggcagaggcaggcggatttctgagttcgaggccagcctgatctacaaagtaagctccaggacagccagggctatacaagaaaccctgtctcgaaaaaccaaaaaaaaaaaaaaaaaagagtagccaggcagggctacatagagaaactgtctcaacaaacaagatacgaagttcatgtagaaccagccaattagaaactctcaaaccccatcagcatggtatcacctccccattgtctgaagctgtctaagtaacgctaaaaccttggctccaaagtaatggtgttaagtgggacttgagcttcgtgaaaccatcagcaacctctgaagaggttccagagagcacttaccccttcccaccgggtaagaagcaaagaggtctgagccaggaagcccttaccagccacatctgccactatgacctggggcttaaagcttcaggaagtatgctgaatatatttgttgtttacagaccattcagcctgtctgagtcagccaagtctagggcacagcctcagatttttaaggttttgtccagaaatacccatcattccatggtgttcatggcagatgggagcagtgcaaggccaggaggaatccagaaacaggtgggctctcctgtttcttccttccacatttattaaacgttattaaccaccaaaaggggtctctggtgcttgggatatgcaaaggtaagtggagatggagggtgagaggctcaagttacttgtgtctatcccagggctagaaggctgctcaccagaatctacaggccaggccaggtgccccaggattgacagcaaacagccatgtccagaagggagatagccatatcagttccttggccaaagcctgtccagggcctgggagacaggactcgtggctaccctgctccacatggctgaagcccacctgtggccactcctgctaggagtagatgaaatacttgggctgaggcttctgtaggccagaggccactggacagactgtggggtaacaccagtttaaggatctcaaggtgtgactgacgctaatgttttttccatgccatatggaacagagtgacatcacggtgtctacttcaagggctcaggactataccaggctgagctgacacttctattacattcgaaaccacaggccagcaatagttaaacaagggcagactttctcagcaagaattctgcctcttgattgcttagtaggacgggaggaggtagtgggtgctccgggaacaccaggggaaatgatgtctcaaaggctcatgtaggtttctttaaaacctcgctaatgtccagactcaagtactagatctatggagcccaccagaaactgtccactgttcggaggcgccttctccgccatcctccctacaggggccattgatgtgagtgacctccgaccggtgccagacaaccaagaagttttctgccatcctgtgaccaaccagagtctgatcatagaacttctggagctgcaggcccacgtgcagggcgaagcggctgcgcggtaccattttgaggacgttggccgggtgcagggggctagggctgtgcacgtgctatctgtacagcctctctgtttggagaacttatccctgagaggctgctgtcaggatgcctggtccctttctggcaagcagcaggtagctaaagaaaaccagcaggtagcaaaggatgtcacactgcatcaggccttgctgcggctgccccggtatcagactgatcttttgctcaccttcaatcagcccccgtgtcacagcaggtctcttggccctgaaaatctgtcatgtccaccttggagcctgagtaactttgaacagccgctaactagtttgactcttcatgatcccaacctctttggtccccagtaaagatcgttgagacacaacgtgctactgaggactcggggacccagttctgagagggggagtttctttctgcttcttccctggatgtaaacataagatactttctctgcagaaataaacttgctttatgaagaaaaaaaaaaaaaaaaaaaaaaagaattctgcctctttagggataggataacatacactgttcacctttaaaaagagtcctgagccgggtgtggtggttcacgcctttaatcccagcatttgggaggcagaggcaggtgaatttctgagtttgaggccagcctggtctacagagtgagttccaggacagccaggactacacaaagaaaccgtgtctcaaaaaaacaaaaacgggttggagagatggctcagcggttaagagcactgactgctcttccagaggtcctgagttcaattcccagcaaccacatggtggctcacaaccaatgggatccgatgccctcttctggtgtgtctgaagacagcgacagtgtactcactgtgggaagccacatgtgccgttgcagagtggtgctggctactgctggccaccacgcataagtttggacaaacaaccaatgtgtacatatgcagtaaagctttttgccaagtcactgcctggcccgagcatgttaatgaggtactgagaatataaccaatcagatgtgagacatgcaaatgaggtatgttaatgaggttctgtaaggtactgagtagccaatcagatgaggaacatgcaaatgaggcatagtgcataaccaatccgggtgtgagacacgcctttcctaggcctatataagcagcaccagttctgggctcagggtctcttcgcctctgcaatcaagctctcccaataaatgtgtgcagaaggatcctgttgcagcgtagttcttgatggtcgagtcaggcgcacgcaagaactcacatacataaaataagtaagtcttctttaaaaaaaaaaaacaaacaacaacaaaaatgagttcacagccaggtgatggcacatgcctttaatcacagcctacgggaggcagaggcagaggccggtggatctctgaggtccaggccagcctggtctacagagtgagttttaggacaggcaaggccacagagaaaccctgtctcaaaaaagggggaggggataggggaggctggagagatggctcaatggttaagagcactgactgctcttccagaagacctgggttcaattttgagcacccaagcggcagctcacaactgtctgtacctctagttccagggtatccaacaccctcataaagacatatgctcaaacaaaacaccattgcataggaaatataaaaataaacaagttttttaaaaaaaaaaaaaaaaaaggaaagacgagaaaggaagttcatagcaagctccagcctgtggtccatccacacgattcccatgaacagtggaagggacagaaatagccgaaagcccacagaagagtaacgccccatcctgagaccccacagctgactacatcccgtgggcaattcttcttggaatcgtcaatctggagttctcagggactgcctggccagccaagacactgtgctgggatggaggaaagggtgcctagtctacattaggactgacagtccacaagtattaatccctggaggcttccagcattccacaaggtcctgatggaggcttgagtgtcccatcgagtgtcagtacaggagaccatggtgagttcagtccttgtctctaggccaccaggactgcatccaagcttacttcctataggatgaatacatggtccaggctcagcaccagcagacagagtgtcacagacaaaactgtccagcagagggagccagtcacaaagcgggaacccgcccaaacccttgcccgggagcctcaccggctgccgcagaggaagagcaggttctggacagcaggaactgtggagttagcgttctggccagtgaccagatggcggtccagcaccacgtgcacagcgtcgggctcactggctaaggcaaaaggcacaagccttaggcacacaaagaccaggcccagacccactcccacccattagggatctgtgaacacacagcaagtagcctcgcccatctaagtgaaggggcaccaacttgaactcaccactgaagccagcaccagagtccttcacaaagtcctcaacgatcaatggtaggcgggcaaagccaggtgctctgatgagctcgtacactgaaggctgcaagggcagggcctgtgtcagaccagctagtggctttacccagtccaatgccctactgcccaaaggaccaaccccagggaccaggcagatcaaatccgcagggggagatggggtaaaggcaaagctgacatcttttagggactaagccactacggcatcaaggtatatgtgaccaaaatgagatgggcaggtatcctcgtatcctctggaaggattcccttggagggtcccatgatgtccaggtaaggggctgaggttccaggatgtgtttgccttcttacacttagcacacatcacccaggcaaggagagaactgttgtagcagcatagggaatgacaggtcacagtgcaggcaggaagctcctcctgggtcaggtaggggtaaggaaggatgctggcttgtgcacgaggtactcacccctgtcagactgtagccctggaacacccaggacctatcttcattggtagcacagcacagggcagcaacaccatggccaatggcgcagatgggttctaaaagcagcaaaatagtctaaggccttggatgctatcctgggtagggtcccctcccaagtgtcccctcacccaaggttgatgtctcaagactaacctagagcccatactgcctgagctttgagacatgtgcaagcatgcagaactcccagtctatgtaccagccactgcttccaactgcagagaagctattgggggctgtcctcccagggggacatcctgctctgcaatgaggctaccctggctttcccccaatggcaagttaatggccagtgcgttcccattgccgaggtgactgggaacaaatgctgcctgtctcagcctagaaatccagctctcaccaacaaaggacaccatgtggagcctatctgcatgctactctcttatgagcatcctgtcccagcctacaggtgtgcttatcacaacagatgttgcccactccaatcaggaatccagacagcatcctgactagcctaccatggagaaagctaagaggccatggtcaccagccctctcagcctgaaaaggcccacagcacactgactgacagtacacacagtatatttagtgggatccctctgttgtgcacatgatctcagagcaaacttatctgtgtgtagtcagagccgctgcagctccccactcccatctgatgggctgatgaatcaccaggcatgcccagtcctgaacacgaaaccctgtacccaatatccactccatctcccccttccaagcctatatagtctagttccctgtcatccactgttgtggttgttccctcctccttcccacccagtgtctgcctgtcagcctatcctgcagtttcttgtcacccactgctctcagagcggaagtgctgcagtattcgagccagggacccactgctggcaagatctgtcagggcgccaggacagctgggaatcaggagggcatggtaccgggcacctagggggaaaacacaggtcaaataagggcaccgccaggacacagtcctccacagggatccgctgtccagaagccaccacagacctcatttccaacctaccatctatggactcaagcttagcaggactggcgtatgccttgaggcggaagtcttgtacccatcgggcattgctctcagtcacatccacaaagtcaatggcctttccctacagaagcagggttaacactggtatctcccccacatttggatggcagaaaactcagaaaggctaacagacttaaaaacagcccagggcacaaacaccctcttaaatagcacttttactggctggcccaagcaggaagcctccagtggctatggagagagaaagatcaagtacaaaaaaggcccagagagccaaacccccagtgtgtggagcccagtgctactcaatactgaggtctttctataccctgctctcccttggtctccagtctcctacttataaagtagcaacaactgtccacccagctcatgacttcaaaacactcaaagtcacaaatacacaatacacacttgccgtgacccatttataccgtatgtccccaggatacatgcaagaatcaataatctctcctattaggagccaagtgtgtaggacccacacactagggtcaagccttatctttcacttaaagatggcctgcaaaagtgcaagccacaatggaaaaaaattttttttccctgaagatgggtagtcagagtcagggaactgggatggtggcttaaggatgcctccaagactggctgtagatccccttacctgaaggtagctccctcctggccctatcagctacagagggctctctacactctcctagcctcaactcagaaaggagaacagctcaccctagagaagggtgactactcacccctggggtggccacctgtaggttgaaggcagcactggccagtgtgaaacagtggacgaaggactgggctgacacacctgcaaaagaggggtccagaaaagtgagggcatgatagggccagctgtctcatccctattcatagactgctccagtgctcctggggccatcctggtcccagaacctgccttaggggcagtccattttacccaccccagggcctactccctgggggcaggacagcagcccttcaggttcaggaatacataactgagaagacctgctcagaggtccacagcaagtctattattttacccagctttggtcactggaccctgaaagacctgcaggtgctccagtggttctgaaacctccctggacaggctctccacttgacctaataactctaccttcaggcccccaggtcaccttaactgtccaccaacaccattacacccttggctgcatcctaccctttcccactataggtacttccaaacaggtaaatgtctggtgcatccccttagagatccaccaggatccaaggtccccataacctgggaagagcagcagtgaacatgtcacagaggtaaacgcagcaggagaggagagtggtgtctggggcactcccacacccaggacatgggtaagattctgccccaccatggtattctcagccctcttctgcccatcaaaagtggcacacacctttaatcccagcactcagaggcagaggcaggcagatttctgagttcaaggccagcctggtctacagagtgagttccaggacagccagggctacacagagaaaccctgtctcaaaaaaaccaacaacaacaaaaaagtccttcaaaaaggaacgaagcttgcctaattcaaaagactctagcccccaggtgtggtaatgcacacctttatgcacacctttgatcctagcactttttaaaagatttatttatttactttatgtatatgagtacacactgaagctgtacagatggttgtgagccttcatctggttgttgagaattgaatttaggacctctgctcactccagtccaaaggtttatttgttattataaataagtacattgtagctgtcttcagaccaaatggttgctctctcccatcctggtcttaagacaccctgtgggtcttaagacactccagaagagggagtcagatcttgttaaggatggttgtgaggttgttgggatttgaactcaggaccttcggaagagcagtcagtgttcttatccgctgagccttctcaccagccccctagcatttttttaaagacagcatctcatgtagccattgccctctctatcctcctgcctccaactctgacactaggcttttggcttgtggattttgttttggttaatattttgagtcagacctcactgtgtactcctgctagcctggaacttgctatataagttccagacgggctcaaactcctggagatccatctgcctctgcctcctgagtgctgggattaaagataatttttagcttctcaatccctcactttccgactctcaaggaaggcctacctaggagctgctgtagattctcttttacctctattccagggaggagcagcaccctcaggcccctcccaccctcacctgggacgcttcagtgtggaacccagaaattcatcagtccaagatcccgacgtaccctcgcgctcacacccacttgcagaggtctataggaatccagagggaaaccccgggccgcagccctgggctccacctccccacagagactatctcgggccagtcggttccctaaggacccgtgaagtaatcatctgcccagcgcccctgacacacaccgggcagttggaacatgaagccaacagaccccttctgcgtgagggtcccttttatgcagctctttcgagcaacctctttcaggatcgcttcctggaggtgcacgaagataaacccaagatagggggtaacagagaggcagaaaacacgggcagagagagtaccaagcccctgcggctcactcgggggcagggtcatctctgcagccgctgaccgtccctgtctgccagcgcagacaacatagtaggcctgcgccagagaaacagatgcagggtcccagaatctcaactccacaaacacaaacgtttgcccagagtcaggactgcaggccagtgagctacacagctgccctgcgcgcctcaccttcggaagcgccgctggccaccaggagacacgcaggcctgcttggcagccgctcggacgccatggctacagcccaggcggatatttgtgcgagggatggggcggggcggggctcgcctgcagagagcggaatgcgcatgcgtgaggcacgaagggcggggctcgccggcagggtgcaaggtggggtgggagaaacaacgcggaaattgagtgaagatgggggcagtttgcgcatgcgcatggggtagtggttgagtggcaagcatgcgaggggcggggactgagcgggggcggagcggggcggagcggggcgggggttggaggcggaggcgggggaggatacgccctgggtccctgagtggtcgtttcctgattggaagccaccggtacagacttgtggccctagggcacatcaattaaacccagtgggccgggtagatgtttccgagtccgagtctaccacagagctactacgccttgggcctttgcccgaaagttgagcctggctaagtgtgtcagggagcgatgaccggtcgggcggacagggtgaggggcacagagttgggtcgtatgtgggcgggtcttcctctgccggtttgtgaagatccagaagatacctgggtcggttgagttttgtatgttcctatagaggatggaatgtcacttcctgagctgtggacgcctctggaggttctgttgagtttcctgaggaaaagaccagattggggaggccaacctgtatctaaagcgatttacttctgtgggactcctgctggggcttaggaaaaggaacctggagcccaggattgtgtgttgtctgagtggcgacttttgaagattcacaagccacaagcttgactagccatccttattaaatccccatctattgacatgaaaccctgaaattgaaggggtcagattggctagtgtccacatactcacacagttccacctttgtgctgcctccagagtaacattaaggcaccagaagtggcagagccagcagtaagcttgagtcttgtggagaaaagtatttatattgaattcaacgcccaggtattagatataattttgtaaagagactaccattccagggaaatgtatagacagggcaaattttacccttgaggaagagtgtgctggagaaaatggtgaacagcaccccaagacaggaagagcatttgattttgttttaactcaggtggtggctgtttcttttgcccactgactggagtccgacctcacaatcttattaactagtcgggaaagactcaacatacaagaaatggaggaggggaaagcagtccctgactgaaggagaatcactgttccaggctagtatagagaaatacacctttgggtaaacaaagcttttactaggtggaaaggattaaacatttgcataaaagtcttacaaggtgaaggagataaaaatatttggattcttcattcttttttttttttttttttttttgtgtttttgagacagggtttctctgtgtagtcctggctgtcctggaactcactttgtagaccaggctggcctcgaactcagaaatctgcctgcctctgcctcctgagtgctgggattaaaggcgtgcgccaccacgcccggcttggactcttcattctaaacacaggttttataatattttgatagaaaagactaatatttgctgggtgtagtagcctgtgcctttaatcccagcactcagagacagggcaggtggatctctgagttcaaggccagcctggtctacaaagggagttccaggacaaccagggctacccagagaaatcctgtctttaaaaaaggggtgggggggcctggagagatgactcagcagttaagagcactgactgctcttccaaaggttctgagttcaaatcccagcaaccacatggttgctcacaaccatccgtaatgagatctgatgcactcttctggggtgtctgaagacagctacagtgtacttacatataataaataaataaataaatctttaaaaaaaagactgatacttgatatttctttaacaggttccagtcctgagggaagtcagggcaggaactgaagtagagattgagaccatggaggaatactgcttgctgactttttttagctacctttctttgcttttgtttttgtttgttcatttattttttctgagctagggtttctgtgtgtagccctggctgtcctggaactcactcactctgtagatcaggctggctcctaacagagatctccctgtgagtgctaggattaaaggcgtgtcctgcctaccaccacccagctctagctactgtgtgtacctcgcctgacagacatgtgagtcacatagctgggggatgcttacttgagtaattctatgacctatgtccacagtggcatgcttgcaagtgagcacaatgtctggtgtccagcagagcctatgggaatgcccatgacccatatggtgttcagcattcaggactagataggcagatgtaacagacaagcagtggttggccagaagccatgctgtgaatctgacctccctaggccacctccctttgtctcctgtgatcagtgggaaggattgaaggtcctagcacgtggcgttgtagggtcagaccctagtgtagcgttacctgccaaattgcctgttgctgagcaacatcctggatcctttgtgctcaggtaggtggcctggtacgttggcccccaggcacttcctgctacaatgactaggccttgcccctaactccaggatcatccttcagggctgatgtctgggcccagacacctggacaagatggggccacaatggggattaatgggcaggttttgccacttgacggagagcactggaggcctttgggatgtctctgggcaagacccatcatgagtgaggctcagtgccccatcctgccctgtggagctttctcttagtctccttcatggagactggtcctggttatgaggcttacacccctgagccctagacataatgtgctaagacatcagatctatcagcaagtgcccatgtgggttcttgggtaggggagggttgaggactccatatgtagggtcagcaatctggaactattgatatacttggcaagttgggcatcaagaaagagggctggtagccgggcatggtggcacacgcctttaatcccagcactcgagaggcagaggcaggtggatctctgagttcgaggccagcctggtctacaaagtgagttccaggacagccagggctatacagagaaaccctgtctcgaaaaaaaaaaaaaaaaaaagagggctggtgagatggctcagtggttaagagcactgactgttcttccaaaggtcccgagttcaaccatccataatgagatctgatgccctcttctgtgtctgaagacaactaataaataaatctttaaaaaaaagaaaaaaaaaaaaagaaaaagaaagaggcattcgccgggcagtggtgacacacgcctttaatcccagcactcgggaggcagaggcaggcagatttctgagttcgaggccagcctggtctacaaagtgagttccaggacagccaaggctacacagagaaaccctttctcaaaaaaaaaaaaaaaaaagaaaagaaaagaaaaaaaataaacaaacaaagaggcattcaagccaggcacagtggtgaaagcctttaattccagcatttgggaggcagaagcaggaggatcatgaggccagtctgatcgagcttcagaagagccaaaattacagtgaaagaaaatgaggcagtccttctcttccatatccggaatctgtttctgctgggatgtaagggcagtaagagtcccaagagacttctgccctgctgggctaacctgtgctacaaggcctcctgtcccctgggacccctgctgcctctgtggttcctgtttcagaacaggcctgggctgtttccagaccagctatgcacatcaaggaggtgcttttcgtcaaactcccaaccttcttaaagcctgaggcaccagctacaacatcatctgctcagtactgccttcatgagaacaccctcatgccgcccgagttgtcctgagtgcccctctctgttagttcaggtgactatcacatgctccttggatatgaggactgagtgttcagggacatgaggttcttttgggttggggtgaatcacagtccttgccatgtaaatacttctcagggtggaaggtgaggacctgcctagagttgagaggcagccctcaagtgaccttcaagacccagatgaagccctttccccattagggctcaagtggggttctcctagaccaagtagactgggtgaggtctgcagccttaaacataagtcatgcaaagctgtactaggcaagtatgtaagcaggcatgggggtgtgaaggttcctgcacctaaggtgggtcctctgcaatgtcagagtgctaaaacggctggccagccaaatactaatatgtgggcaggtgatggcgctgtggccttaagtagggcggtatggccaggaagcaggcacaaaagggtccctgtgagtaacaagtctaagagcttcactctgatacccctagatccatggggcgggagggggcagatgagaaggcttcatagctgtgtgcccctctctccatgaagagcttattccagagagtctcctcatctaccctctgaggatttaactgcaccgtgttcttttttccttcttagaactggaaggccaacaaaatcagtcaccaccaggaagaaggtactgttcttctgttctgggtcaaagaataacagaagcttgaagagagctcgaatccacgtctcaaccctagcagctggagctcctagatacagctcagatagaccacagggatggtggtggaagtgggcgtccaggcacgggtgaaggtgtccccactctgccattcttttcagttactgtatagccccacatgagcaactgggattgggattacaggcgtggattctctgggaaatgggcgctggttctctctgatcctcttagtctttttctgtccttgtcatagtgcttgtcatgactcaggcattaaagggcagagcctctactgaggagatacagggcaattagatgggagcaagcgtaaaggtgagtggctggcggctggttaatgtgcctcagttgcagcagaagcctagctgctccacttttattgcctgctgtcgctgacggctgagtgggcagctggccaacttccttatttctaggatgcagaaagcatggctcatgtattgcaagctgctccagagcacatcaatgtgcaggtgaaccagcttttttttgtttttctgagactggcctattcaacgagtagagccacatcttgttagttatgcctttctctctcctctctctcttttaagatttattaagccgggcgtggtggcacatgcctttaatcccagcaatcgggaggcagaggcaggtggatttctgagttcgaggccagcctggtctacagagtgagttccaggatcagccaggactatacagagaaaccctgtctcgaaaacaaaacaaaacaaaaaaaagatctattaagatttatttattatatgtaagtacactgtagctatcttcaaacacaccagaagagggaacaaccatgtggttgctgggaattgaactcgggacttctttaagagcagacagtgctcttaacctctgagccatcaccgctgagccatctcaccagccccattcatttacctccttctctctcctttcctccaagtccttcccttccaccccatccaccacctatgcacatttctgaccctctaaacctaaatttcttgctgggaccccagagatggacttgggaagcctctgaacaccatcgaaggagggaggaagggagggagggagggagggagggagagagagagagagagagagagagagagagagagagagagagagagattgctagtcctgggtttgggcgtggggggatgttgtttgttagttttttagtttttttaaattctggggttgcacttaggatttcaaggtaagtgcttgttcactgagctaacttcccagctccttatttttctcttccttctgtagctggcatattgaggatggcttgttaggcctgtcaaaggccagactttgaaccaaacagtttggtaaggctgctgacgtaaaacaaggctttcacttcaaagtgagtaagagatgtttgttctaaaccaaacgtaagtaaccatggtccaggaacaccagtcaggttgcctcgaatgggttcctgtgtaggcgtgggtacatgaacattagttataagacaaaacgtcataaatggaggcatttgccagatacgttggtatgggagggacaccagataggaaggtagatatcaggggaatctctgctgtagatttcagatgttgtctgataacattctttgcttttcagttggtagacggagagttaatcagtccaaaggttcttcctgatagaaggatggtaggtcagacaggcgtggacaatgagtaactacaaagggagctaaagataacccaagataatgtggctctggatctgggatgttcccactctacacattaatcatgaggtcctgcttgttcataagccttgtgccttgtagaatcttttttttttttttaaagatttatttatcgggactagagagatggctcagtggtcaagagcactgactgtggtcttccggaggtcctgagttcaattcccagcaaccacatggtggctcaaaaccatctgtaatgagatcagatgcctacttctgatgtgtctgaagatagctacagtgtgcctatgtataataaataaatctttaaaaaaatttttatgtatatgagtgcaatgtagctgtcttcagacacaccagaagagggcattagattccattacagatggttgcaagccaccatgtggttgctaggaattaaactcaggacctctaaagagcagtcagtgttcccaaccactgagccatctctctagtccctagaatcttttttttttaatgcattggtgtttttgtttttttgtttgttttgtttttttgagacagggtttctctttatagccctggctgtcctggaactcactttgtagaccaggctggccttgaactcagaaatctgcctgcctctgcctccggagtgctgggattaaaggcatgcgccaccacgcccgactcgcattggtgttttgtctgtatgagggaatcagctcacctggcactggcactggagttacacacaaagttgtgagctaacatggagatgctagaaatggaaccagggccctccagaagagcagccagttctctctctgtctctcttttgtttttttgtttgtttgtttgttttgttttgttttgagacagggtttttctgtgtagccctggctgtcctggaactcagaaatccacctacctctgcctcccaagtgctgggattaaaggcacgtgcctccactgtcctgccagacagttctcttaacagtgtggcttttttacgggatcttgagttttcagggctaagcaaagttgttctttctccctgtcccctactccacctccccatctacatctaaggatgtaagggtctgagaatcactgaaaaaagaatccagtcttgaatattatgtaaaaacaaagagtatttgttctgcagaaacagccagcatgcaagagcaaccatccaagcaaaatggcagccctgagggaagctcacagcccccttttaaagccagttaggcagggcggtggtgacacacacctttaatcccagcacttgggaggcagaggcaggcagatttctgagttcaaggccagcctggtctacaaagtgagttctaggacagccagggctatatggagaaaccctgtctcgaaaaagccaaaaaaaaaaaaaaaaaaaaagccagttagagtttttccaggtgtggttgggtcaccttaatcaagattgtttaagtttatggtattggctatttgtatacttctgattggtttgtaccccaagggagagagggttatcttatagggatttccccccccatctcttgtaagccccaggccagatgttggggtagttgctgattggctgcccccagcagtgtccagcccaagggcacctctgtgaaggtgacatgatcttatcagaacatttcagttctgtggatctgtgtatgatttggcattcacaagcaggtttggtttggtttatttgtttttccctagacagggtatctttctgtacccctagctgttctagaactcactttgtagaacaggctggtctcaaactcacagagatatgtttgcctctgtctcctgattgctgggattaaaggtgtgtactaccacagcctggtgatgggttggttttgggttttttttgtttgtttgtttaatatactgagtattttctatatctccatttgtttagactatgaaagttgtgataaaaataatttaaatcggctgttccacggctgataattgtgaagcttgtttccttttctgggatgcgccttactttacttaagttaaaggtcctggaaagccgggcgtggtggctcacgcctttaatcccagcactcgggaggctgaggcaggcggatctctgagttcaaggccagcctggtctacatagtgagttccaggacagccagggctacacagagaaactgtcttgaaaaaaaggaaaaaaaaaaaaagtcctgggaagcattagagcccctcatctaggacctctgccatctcaggtgcttcctcaaggtaggcaagtgtcccactactaggtgacagcccaaccctcattttcacagggacttcactaagctttcctttatagtttaggctgtcctcacatgtatgatccttctgacttgggccagttgttccagctccagcggtttctttctttctttttttaaatttaggcatatgagtgctctatctgcatgtatacctgcatgccagcagaaggcatcagatcacattacagatggatgtgagccatcatagggttgctgggatttgaactcaggacctctgaaagaacagccagtgctcttaacaactgagccatctctccagccccagcctttctgttttagtcccaagctggtctcatgttatagcccaggctgtctcaaactctcctccatctaactctgcctcctaaaggctgagattataaatgtgattatcttgttccctggttctaatgttgctctggagtgagcacaagtaggagactggaaaagcaaaggaaggagtcacagtcataggtggcagatgcaagcttagcacaggccatgctaaggacaagaggagatggtgtcacaagtcggtggtagaggtctgcctgctgcctgaggctgaggccatcttggctctgatagaacagaaacaccttcagagccctggctggccatccacagggaacctacttgcccaacaggattaagtgtgagaacatggtgagatagtttcactacatagcatggcaaggtctcctatccaagattccagaatgcaaggggacagacagtgtgacatttgacaaacctctgctgcaccaactgtgaaatcatttgcaataagcagcagcactaaaggcttcaatgcaaaatgagtaataaagtaagtgggacatagttcagtcaggtgaccccagttggatccccagaaatcccataaacagcaaaacagacaaagccaggcatggtggctcataactgtgacctcagcactggggagaaataggaattcccgagggttgcccatcagctagcctagcctacatagtcccagaccagtgagagagcctgcctcaaaacaaaacaaaaacaaagtaggtcagggctggtgagacgcctcagtagttaagagcactggctgttcttctagaggacctggatttgattcccagtacacatagggcaacttacaacaccatctgtaactctagttccacatctgtaactctagttccaaaagatacttcaccctcttctgacctctcgacatcagatatgcaggtagtacaaagacatgcatgctggcaaaatagacgtaaaactgtaaaagtggaaaacaaggtagataaactaaacagtgcttaagctctctctctctctctctctctctctctctctctctctctctctctctctcctatctcatgtacaagattggttttagacaggaatggcattatatgcctgtaatctcagtactccagtactcaggaagctgaggcaggagtgtagattcaaagtcatcctgggttatatagtaagagcctgtataaaagggaaaaaaacaaaaacaaaaaaacaaccccaaacaagaaaacaggcacacaggccaggttcagtggccaaaaacacttgttgctcttgcagagaactcagttcagcacacacacatggctgctcacaacagtttgtaactacagttttgagacagggtctctcgtgttgccctgactatcctggaactcactatgtagatcaggctggccctgactgaactcacaaagaccaatctgcttctacttcccaagtgctgggattaaaggcatgtgccaccacatctggcttagaaattaacaatcatagacaaataacaaataaactcccctggatgatctggagtcctcatacccagttctacccttaaagtcatcactaccttccagtagcatagcagctgaccccacccccttccctccccctccccctcgccgagctgcagtacaacagtgtctactaagaaccttccaggtctaaccagagcaaggctttccaaggttttctttcctgccctgtgtaaagatgccaatgttctcttttgagatttaattttgatgcaaatgggtgttttgcctgtatgcgtacacgatgtacctaccatgtgtgtgcccattacctgggaaggccagaagaaggcatcagatcctttggcactgcagttacaaatgattattaggcactatgttggtgctgggaatcaaatccaggttccccggaagagcagttaatgcttttaactgttgagccaagtctctagccccaggcaccaatattttaaaaacaaactaaaagtgtttcaatagagaacaaggagtaacagcatgagaagaatatcacttaaaaatgtcagctctcagcgattcaccacggcagacacagctgcctctgcagcctcccagtgcaatgcaatgcctaaggtgcttatgtgtgttttcccccacccccacccctgcttatgtggttgtttgtttgtttgttttctcaagacagggtttctctatatagccctggctgtcctggaactcactttgtagaccaggctggcctcgaactcagaaatctgcctgcctgcctctgcctcccgagtgctgggcttaaaggcttgcgccaccatgcccagtttcgctctgtgtttgaagtgcaaggcagaggatgcatgggtgggagtactgggtgaggtagcaaatgtcccaacaggcagggtagcctctgcacccgcagaacagatgagttggaggtggctgtgtgtcccgcatgtccagagccctcttcaggaatccctgaatcaggcaggcaccagctggacttgaaagaggcagtctctaccgacagtggtcaaaagggagaccaggaagagtggtctgaacaaggctaagtgttcatttcagatgccttcatcctgttggagttgtccagaattggatggggtgtgttatgcaggcagagctactactctgagcagggtggttaccaagagattggaaagaaaaagccaccagctcaaagaacgcctggggaggagcaggtcaaggagcttgcctgcaagcctcagcggccctagggtgtaaaggcgggtcccaggatgatataaccccaaatgagccttgttctttgcagcctcagtcacagttcccatgtgctgaacacaccagggcagaatgggctcagggagctatggaatccaggggactagaggaggaacccaaccttagcttctcctgcatttcatgggtcaaggggccctccttgctggcacaggttctgaggaacaaagccttctgtcccagtgcactgtgagtggcagcccaggccttgggtgggtggggaacagacacaattatcattgtgaagctcctaaatgttcatctgggttcaggctcccacagaggccagggagggagcacctgggatggggaggggtctggttggagctgaaggcacctatagcccataatgatcagggcatgaagaaccccagacttcctccctgttccctggaaagcctacatgatcactctgtggcccacgagtacccaagcaggaagtctttactgctcccaggtccatgcaggtgaggacagcagcccagcctttatattgtaacggtttatttcaaactcagtctccactccggcccaaggtccccgccgccactggccaggtgagggcaatgtttccttagagcccactgcagttttccggaaagctgctcactgtcaccacaccaaggggcaagctggggccagatgcactaaagaggggctgcacagcaggtcttcctgcaggcagtgagcgattgccactcaccgggcagttctactctacctgtgttattgcatttatacgctgttaaactcaagggggggggtgttgggtgcaggcaggaaggacagtattggggaatattgggcaggcagaactgtagtgtggctccttcgtgcttcctgcctccctgccaggctttcagaaccaccccctccccggaacaattggctgctctgggcaggaagtaaggtggtcctagcctccggtgctctcctggggcatacactgacagagggaagaggtgggaaccccatcccaaactcagctgttaactttgccttttccatccaaccaggacagggacaatgggtagaggtagctctgcagatttgaatcccacccacccttaggtcagtcccccggcatcaggcccagacagactgctcctggctgctcaaaagacaagtgagaggagtaagacagccatgccctttaatgtccccacagggctagcgcactccatcacttatctttcagagaccacacccagcatctctcccctttgccccacgctagtgcttcctgcaaactgcagagctgggctcctgccccagaacttgggagagggtgtgctggggtgagtggaggtgggctcactgtctatttctttcctgctgcacggatgtatgtagcatacatatacgtgtgagtgtgtgtgtgtgttgtgtgtgtgttgttaggtgtatatgtatagataaatatctaggaccttgcatgcactatatattcaggtctgtacagaaagtggctctgtgccccgacctggacaccaggtatcattttttccgggctagaaaggccacaccaagaattagagctatggtggccacggccacacccccagctaccagcaaaggggtcaagttctcacaaggccagggacctcggcctccagtgttggactcgtcctcctctgccccatccccaggacccttgggctctgaggttgcatcaggactgctgggggctgccggcactgtgggagctggcttcaggttgctgtggttgttgagaagtacaggatctgccttggctggtgtcttcttcgtagcggctggcccaggggctgctgcttgctcctgcttctctgcttgggtgtccttcttcacaggcttggtcaagggagctttcccatccgcagctggagtggccttggcctcagctgtggcctgaggcaccttggtatctggcttggggctgctggctgactttcctcgggattccatgatggttttttgctggcagctggtttggggcttgtgtgactggcaggtggctagaccacagtggctcaggacagctcacctctgggcattatatgggtctggagggagacacaagtgagatggtgacaagggacagcacaccttctgtatagcttatctgcctctgccccatagagataacatccccaattccctgaattctctaggagctccaactgaggaacatcctttgggcccaatccctcctttcccaaggcctggcctctatcagctaatgataattcttggagaagccccatcaactcttgagaccagaggcctcagtttcctaacctataatctagtcttgcttcacacgcactgtgtctatcctacagtgggggtagggaggctctgttgtagaaatatgatctaaccctgcaaactgaaagagagagtatttgctcaaaggagacaggcaggaatcatggtgagcgctgacagagctaagtgctgcacgctatcttgggagcttgtagctgttttacagaatgggacgctgtggtgccttggtctcagtttgaggagcatctaagaggaagggaaggacagggaaggagcccagtctgggttctcagactctgtcagagggagagtggatccaggtcactaggaagtgataaaatggagacagagaagccattagggaagttgctagccagtgcttcttctggtcagccatctgccccacccagcttagatccagtgccctttccccagtacaggccacagctttatccaactcaagggcaagagttcctcgctgggatcaaggctgtgctacaggagcaaagagggtccctgacagcattgcctgggggtactgcagagtaaagacctcaccttgagtctctgcatcctagctggggagactggggcccggccaccctgctgcacagaggcttctgtctggaagacctagggccacctgtctacctcccaccctgggaggacaaatggcctctgtgcagaagctcaagctccaagccccccaccaggcacagcggatacactgaaggtcatttgaaggtcacaccgtgatgtagataaccagtgcagaaacccaggtactgcccacctcccaggaagctcctccacgc

SEQ ID NO: 24 - DNA, 9095 bp, Artificial Sequence
  Synthetic Plasmid (pBS_CALB_ftTA)
ggccgcctctcgaggtatttaaatataacttcgtataatgtatgctatacgaagttattagcgatcgcgtactagtggatcctcgcgccccctacccaccgtactcgtcaattccaagggcatcggtaaacatctgctcaaactcgaagtcggccatatccagagcgccgtagggggcggagtcgtggggggtaaatcccggacccggggaatccccgtcccccaacatgtccagatcgaaatcgtctagcgcgtcggcatgcgccatcgccacgtcctcgccgtctaagtggagctcgtcccccaggctgacatcggtcgggggggccgtcgacagtctgcgcgtgtgtcccgcggggagaaaggacaggcgcggagccgccagccccgcctcttcgggggcgtcgtcgtccgggagatcgagcaggccctcgatggtagacccgtaattgtttttcgtacgcgcgcggctgtacgcggacccactttcacatttaagttgtttttctaatccgcatatgatcaattcaaggccgaataagaaggctggctctgcaccttggtgatcaaataattcgatagcttgtcgtaataatggcggcatactatcagtagtaggtgtttccctttcttctttagcgacttgatgctcttgatcttccaatacgcaacctaaagtaaaatgccccacagcgctgagtgcatataatgcattctctagtgaaaaaccttgttggcataaaaaggctaattgattttcgagagtttcatactgtttttctgtaggccgtgtacctaaatgtacttttgctccatcgcgatgacttagtaaagcacatctaaaacttttagcgttattacgtaaaaaatcttgccagctttccccttctaaagggcaaaagtgagtatggtgcctatctaacatctcaatggctaaggcgtcgagcaaagcccgcttattttttacatgccaatacaatgtaggctgctctacacctagcttctgggcgagtttacgggttgttaaaccttcgattccgacctcattaagcagctctaatgcgctgttaatcactttacttttatctaatctagacatatgaattcgatatcaagcttgtgggcccctcctgcagggtgtttaaacataacttcgtataatgtatgctatacgaagttatggccggcctaggcgcgcgtaatacgactcactatagggcgaattggagctccaccgcgcggtgctgctccgttcgggcgtcctccggagttctccgcaccccgcacccagttctctgtatttatcccgccggccccaggccgggccacgcctcctcctgcctccttttcctagctcccgcctcttgctctcaccaaccttcttcccctcccctccgatttctctcttcccaggaaatagctggagctggagttttggagtctaggaagcagcaggtggtggggatcccttgctcagactcatttctcctcacatcccccaggttcagggaggctttcactcctgaatgttagagtaaagcaacatacctagaattgtttgattttttttcagatggaagggaaagctgactgataaaccacgtcagtggagattttgtctacttagtatttatcgaggcagttgagtatttgaacaaaatcagatgtcaagtgttagtttaatttgattaatgcatacgttgctgtggttaattgtaacaatgcttcatattgcgctaatggagaccatcacgtggctgtttaagatgtgagctatgcttagagacagcagaatgcaggagtctgctgctcttgctgttgttactttttgagcttgaagcagaattattggaatgtagtagaattaacttataagaatttaagatgttaggaaggaagtgattttatcgatgccattagttacttgcatcttacaaagtagaaactgaaagaaatgtcaccaggctaaccagtgactccgtagcagccccactcactgattttacagctgcgctgcttctatctctaggtgagggatttttttccagaaactggaaatcattagaggtgggaaaaatatccggctacatgttacaattggtattttaatatgacaaatactgtatttaggttttcttttacgtaagtatttctaagttatctaattgtccatcttttgagaccttatggtctgctgaaaatgaaccctatgtgtctggttacagtaacacaaaagcaaaccagtgtggtataaactttcaaaacgagctcatgaagcgccacaggtttcacgtgtgtcatagaatatggaattcaccacatttgtgtttcctccaatagtgggattgtgaggcaaccaattgtcttctccagacaagtcctgcagccatgatactctaaagttttcatggatgtaagttttgactttcatcaccttatctgattctcacacaaatctcagactgatattatacacaaagcaagccaaactctgagaggataacaaggatattgtttttacttaaaaagattatgtgcatgcccagttgtttatattttcatccattcagtgaacacttatcaacagcttttgggtcaggtactttgctaggtcctgcaagtagtgcaataaaacgtattaaccttaccttctgtggcttacaaaggtaaaggggcatttgacccaatacacgtcagttacttttgttcatatacctcttaatttccagggaaaactgaatctcagcctacccaagtcacatcctcatacaaaagtttgttcctcggtagacacttcctccattagcccatgtttacataacatagttttccatcctaattgtagacattccatcttttttagtgttctactgtgacaaacagctgcaacaaatatcttcagatatttattttagatatacattttttcctggtcataggggtactattgttagtacaaaagcatatataatttaaaatttaaagaacatttctagattagttcttttagtttgtatcaactcagattaacaagctgtaaacatggcatcctcaacatctttgaatgttatagtcttcaatttcttcaatttacattttgattttcttttttttttcattttgattttctaaggtaatattttttcctggataattttttttagcagaagaaatgtaacttcataaaatacatttttctcttaaataactattagtcttagactctcatttaaaatcaacatctctttttagacatttttggtgtcacttcaaaattaaattgagtttaaggacactaaacaagtgtgtgtttcagttctacagctctgaagtaacttaagaactatttctgccttttgcctgccgaatttttcagttcattaaccaagattgggagggtgttatttttcaaatattcaggaacctctctcaccttctaggattctggaagaagtacacaccctttgaatactgtgattgttccataagattaaactttccaaaagcattgcaaagcactcttatgacttgcctcttaggcctcattacacagcattcaggtgaacaggttcacgatcccacgtgtcataagaggagaaaaaaaatctccagcacaattaaactctttcccatttcatgttactgaattattgcatctgtatttagacttaggccctactggcatgtactggctagttttgtgtcaacttgacacagctggagttatcacagagaaaggagcttcagttggggaaatgcctccatgagatccagctgtaaggcattttctcaattagtgatcaagggggaaaggccccttgtgggtgggaccatctctgggctggtaatcttggttctataagagagcaggctaagcaagccaggggaggcaagccagtaaggaacatccctccatggcctctgcatcagctcctgcttcctgacctgcttgagttccagtcctgacttccttggtgatgaacagcagtctggaagtgtaagccaaataaaccctttcctccccaacttgcttcttggtcatgatgtttgtccaggaataaacaccctgactaagacatggcagttcaaatcactatgcatatgggagaaccagaacctttcaggttgaatgaatgctttcttagccttcaaggggaaaagaaaatgctcagatattttactatgggttcaagcacatgaaggattccatcatgctctcttatgaacatgtccacacataggatttctaatagattagtcaagccttcttggggagagactcatgctgttacctactagtgtttcctgaaagatcttacatccccctttcccagaagttgaaaggtttgtagagatgttttggtaaaaggattctattcttagttaggtagctaccatgggaagtatgtttcattcggggtgctaccatttttaaaatgagctgatcaatcaaatgtaggttattcagaagaaagcaaacatggttgagaacagtgaatttacatttatgggatttagaacatgaagggggacttgtggatttagataacaaagtttggcttggaggaactgccctcatgtatctgttgggcttacccagtgagagggagaagactgtattagaaggccagtttactcactcgaggtatcttttacagtttaagcagacttttctcctttgcaattcttcacaaagatgaacacttgtatatgagtggtttgtccccacatgtgttcagggatactcattcattcaagcactttattgatcacaatatagaacccagggttacaatggtgaatgagacagtatttctacccttgctagcttaaagcttagcagaaataatgttgcaatggagcctacatggttggctgggataagagttatgaaaagaatactggcttggtgatcctttgacattacagcttcttggaccctttccatctctttagttctacatttttgtgactgcttgttctggcctatattgggataaatatcatgaatgtgaacaagaaatttctagcagtaagtataggttataaccttgagaggtaaatttctttttatttcttaagattttatttttatttttaattgtgtgtatgtgtgtttgtgtgtgcacgcacatgctcgcatgcacacatgtgtgtatgtgtatttgtgcatgtgagtgcattgcccccaatggcaaagaaaagatcttgatcctttggagatagagttttacagggttggtgattcatctgacatggattctaggaaccaaacttcagttcgttataataaagttcatgcctttaacatctttctgttccatagaaatggatttcttgatgataaacagtaattattaaaactttggcctcattaatctcattcctgcattacaaagactactaaatgttacaaagtacaaagcttcatgtattgtgtttgtttgttttagacatggtttctctacagagccctggctgtcctggaactcactatgtagaccaagctggccttgaaatttgagagggtgacctgcctctgtgcctgctaactgatgggattaaagatgtgcaccacaaggcttggctccaaacccatgtattttaatttaccttaatggtattcccacctttaaaaagagacacggaatttcttctttatttaagagaaaaagacttaaaaatgaaaggcctactatcatgtatacttaaagtcaccagacctttgctattcatacaaattttcatcaattctgcactgtttttctcacattttaatatttttgaaatgatgaatctgacagttattggtctatagttatcaggtcaatatgtgataatcagctgtattttaataatgaggaaatctgttaatttcctttcaaagctgtctgagtggtgttggtgagatgggtctccacagataggacacttattacaagcccgatggcttgaatttgattcccagaattcacttgaagagggagggtggagagaaccaactccaaaaaagtgtctcttgatgtgccttggcatgtgcacatatatatacatcatgcaaaacataataaaaccataaataaagtctaaaaactttcagtggttactcatttgcttgagcagtagaatttaaatccattaagcctttaattcaaacagacatatattttagcatcacttccaatactgtccttgtaatatctaacaacaaaatcatttatatattttgaacattgattctttgggatgtctgttgacccctcctttggcatctcagataatattttggcattggtataaattaagttactttcttgtcctctgtcttccctgtctgactcctcagtaggaaggtccagttatttactaagcaatttaaagagttaaactaaaaacaattaagttcatgaattaaagtcagctaataacaggttggaagtttgttacattttgattttaatctgattacaagttaatatctgactagaagaaatttattacatgttaatatttaaggttgcatttttttttgtaagtacaaatgagacaggtctggtggaacaccttcattaaaacatgaaatgaatggaaatattagcctttgtttttttatttctgtgatcctggggatggaaccagggccttgtgcttaggaaacacgtgtcctacagtgctagaagctcaccccccccattagccctttaaggatgcaataggaattgaaagtacagaaggagtctaaacatgtatttctcaaagtctggtgcttgtcgttcttctagacttctatcttctcaggtgttttctgtgctgtttctccacggaagcttttcagttctcagaggcttccctttttcttgagggtctttgcacatacatccactattcctggaacatctatatgaacatcatttgggaggatggccaagaatcatttcttcaagatgtccatattaaatattttctgttctgtttctgctacatacccagacaggacactgcaattatcataccatgaaatgcccattgtgaccaagaggtgaccaagtcttcatttgtctctgttgtttcacaaatgctcgacttaaacaaaactccctattgtatttttattatttatttatttattgcattttgagacagggttttattattcagttcaggctggcttaatattcagggttctgcagtctttgcctccggactgctaggattagatgtgttcatcaccaggtatagccccaatattataaaagtgatgtattacttgtaaaaattcagatttatgaaattttaattaaaggtctaaactttcaatacattattgacttcttgcgctcagctttccagtgatctaagtttaaataatcatgaagaaaagagccatgtggagagaaagaggaacaagtgaaaatcctcatcatttcattcaaatccattttacattcatgcaaatgtaacagccagttaaaagaagtaattgtgtggacgtatggctgagagtaactcagaatattaaagccagagaagtctcaccccaaactgaacttattgtatccaatcttccccttccctcttacagtctacatgtttctactctgtacttcacatgttgcttgaagggtaatgtatcttttaattgtgttaacagaaatagaaccataccactttcccatctctctttcttccctagagcccctcctaggcactgtcctttcaatccttcccataccttgtccccattctcaagttgatagccctttccccctatctttattattcttacacacatgtatataagtatgtatatgtgtgtacaaatacatatataaatataacctgctaaatctgtttttgttgttgtttgtgtgtagatgttttaggactgaccactctgcattagatcatcaatattcgataataaggtctcacccctggcagagactaatctctgtccagcagtcaatagttgcttgtgatttcttgcctaggactctaagaaatttaccacttccatgtcatcatgctcattgatactgctcctatttcagttttgtttatgcagtcgtttctaggatagactttcacagcaggcttcatgtactctggctcttagaatctctccttcatgtctcctgtgacattccttggcccagtaatgcaggaggtatgatgtagatgcatctacccattcatgacccattgctctctcaatgtgtgcaattgtggttttctgtgatagtcttcatcttcgtaaagaggggcttctttgatgagaggtggtagccacactcatctgtggatataaggataagatttagaatgtagtaagaaattatgctggtctaacaaagtggtggtagtggactcttatctaaagtccatgacttcactagttttgggaagctagttagctttttagtagcatgcatgatttccctcctgttgagtgggccttaagtctaattagatggctgttagttaccactaagttatgaatgctacttattgcatctttgtggatgtacccagcttttgttccctttagtgagggttaattgcgcgcttggcgtaatcatggtcatagctgtttcctgtgtgaaattgttatccgctcacaattccacacaacatacgagccggaagcataaagtgtaaagcctggggtgcctaatgagtgagctaactcacattaattgcgttgcgctcactgcccgctttccagtcgggaaacctgtcgtgccagctgcattaatgaatcggccaacgcgcggggagaggcggtttgcgtattgggcgctcttccgcttcctcgctcactgactcgctgcgctcggtcgttcggctgcggcgagcggtatcagctcactcaaaggcggtaatacggttatccacagaatcaggggataacgcaggaaagaacatgtgagcaaaaggccagcaaaaggccaggaaccgtaaaaaggccgcgttgctggcgtttttccataggctccgcccccctgacgagcatcacaaaaatcgacgctcaagtcagaggtggcgaaacccgacaggactataaagataccaggcgtttccccctggaagctccc

SEQ ID NO: 25 - DNA, 10414 bp, Artificial Sequence
  Synthetic Plasmid (pBS_CALB_fSTOPtTA)
ggccgctctagaactagtggatcctcgcgccccctacccaccgtactcgtcaattccaagggcatcggtaaacatctgctcaaactcgaagtcggccatatccagagcgccgtagggggcggagtcgtggggggtaaatcccggacccggggaatccccgtcccccaacatgtccagatcgaaatcgtctagcgcgtcggcatgcgccatcgccacgtcctcgccgtctaagtggagctcgtcccccaggctgacatcggtcgggggggccgtcgacagtctgcgcgtgtgtcccgcggggagaaaggacaggcgcggagccgccagccccgcctcttcgggggcgtcgtcgtccgggagatcgagcaggccctcgatggtagacccgtaattgtttttcgtacgcgcgcggctgtacgcggacccactttcacatttaagttgtttttctaatccgcatatgatcaattcaaggccgaataagaaggctggctctgcaccttggtgatcaaataattcgatagcttgtcgtaataatggcggcatactatcagtagtaggtgtttccctttcttctttagcgacttgatgctcttgatcttccaatacgcaacctaaagtaaaatgccccacagcgctgagtgcatataatgcattctctagtgaaaaaccttgttggcataaaaaggctaattgattttcgagagtttcatactgtttttctgtaggccgtgtacctaaatgtacttttgctccatcgcgatgacttagtaaagcacatctaaaacttttagcgttattacgtaaaaaatcttgccagctttccccttctaaagggcaaaagtgagtatggtgcctatctaacatctcaatggctaaggcgtcgagcaaagcccgcttattttttacatgccaatacaatgtaggctgctctacacctagcttctgggcgagtttacgggttgttaaaccttcgattccgacctcattaagcagctctaatgcgctgttaatcactttacttttatctaatctagacatatgaattcgatatcaagcttgtgggcccctccgatccggaacccttaatataacttcgtataatgtatgctatacgaagttattaggtccctcgacctgcagcccaagcttacttaccatgtcagatccagacatgataagatacattgatgagtttggacaaaccacaactagaatgcagtgaaaaaaatgctttatttgtgaaatttgtgatgctattgctttatttgtaaccattataagctgcaataaacaagttaacaacaacaattgcattcattttatgtttcaggttcagggggaggtgtgggaggttttttaaagcaagtaaaacctctacaaatgtggtatggctgattatgatctctagtcaaggcactatacatcaaatattccttattaacccctttacaaattaaaaagctaaaggtacacaatttttgagcatagttattaatagcagacactctatgcctgtgtggagtaagaaaaaacagtatgttatgattataactgttatgcctacttataaaggttacagaatatttttccataattttcttgtatagcagtgcagctttttcctttgtggtgtaaatagcaaagcaagcaagagttctattactaaacacagcatgactcaaaaaacttagcaattctgaaggaaagtccttggggtcttctacctttctcttcttttttggaggagtagaatgttgagagtcagcagtagcctcatcatcactagatggcatttcttctgagcaaaacaggttttcctcattaaaggcattccaccactgctcccattcatcagttccataggttggaatctaaaatacacaaacaattagaatcagtagtttaacacattatacacttaaaaattttatatttaccttagagctttaaatctctgtaggtagtttgtccaattatgtcacaccacagaagtaaggttccttcacaaagatccctcgagaaaaaaaatataaaagagatggaggaacgggaaaaagttagttgtggtgataggtggcaagtggtattccgtaagaacaacaagaaaagcatttcatattatggctgaactgagcgaacaagtgcaaaatttaagcatcaacgacaacaacgagaatggttatgttcctcctcacttaagaggaaaaccaagaagtgccagaaataacatgagcaactacaataacaacaacggcggctacaacggtggccgtggcggtggcagcttctttagcaacaaccgtcgtggtggttacggcaacggtggtttcttcggtggaaacaacggtggcagcagatctaacggccgttctggtggtagatggatcgatggcaaacatgtcccagctccaagaaacgaaaaggccgagatcgccatatttggtgtccccgaggggtgtttaaacataacttcgtataatgtatgctatacgaagttatggccggccggcgcgcgtaatacgactcactatagggcgaattggagctccaccgcgcggtgctgctccgttcgggcgtcctccggagttctccgcaccccgcacccagttctctgtatttatcccgccggccccaggccgggccacgcctcctcctgcctccttttcctagctcccgcctcttgctctcaccaaccttcttcccctcccctccgatttctctcttcccaggaaatagctggagctggagttttggagtctaggaagcagcaggtggtggggatcccttgctcagactcatttctcctcacatcccccaggttcagggaggctttcactcctgaatgttagagtaaagcaacatacctagaattgtttgattttttttcagatggaagggaaagctgactgataaaccacgtcagtggagattttgtctacttagtatttatcgaggcagttgagtatttgaacaaaatcagatgtcaagtgttagtttaatttgattaatgcatacgttgctgtggttaattgtaacaatgcttcatattgcgctaatggagaccatcacgtggctgtttaagatgtgagctatgcttagagacagcagaatgcaggagtctgctgctcttgctgttgttactttttgagcttgaagcagaattattggaatgtagtagaattaacttataagaatttaagatgttaggaaggaagtgattttatcgatgccattagttacttgcatcttacaaagtagaaactgaaagaaatgtcaccaggctaaccagtgactccgtagcagccccactcactgattttacagctgcgctgcttctatctctaggtgagggatttttttccagaaactggaaatcattagaggtgggaaaaatatccggctacatgttacaattggtattttaatatgacaaatactgtatttaggttttcttttacgtaagtatttctaagttatctaattgtccatcttttgagaccttatggtctgctgaaaatgaaccctatgtgtctggttacagtaacacaaaagcaaaccagtgtggtataaactttcaaaacgagctcatgaagcgccacaggtttcacgtgtgtcatagaatatggaattcaccacatttgtgtttcctccaatagtgggattgtgaggcaaccaattgtcttctccagacaagtcctgcagccatgatactctaaagttttcatggatgtaagttttgactttcatcaccttatctgattctcacacaaatctcagactgatattatacacaaagcaagccaaactctgagaggataacaaggatattgtttttacttaaaaagattatgtgcatgcccagttgtttatattttcatccattcagtgaacacttatcaacagcttttgggtcaggtactttgctaggtcctgcaagtagtgcaataaaacgtattaaccttaccttctgtggcttacaaaggtaaaggggcatttgacccaatacacgtcagttacttttgttcatatacctcttaatttccagggaaaactgaatctcagcctacccaagtcacatcctcatacaaaagtttgttcctcggtagacacttcctccattagcccatgtttacataacatagttttccatcctaattgtagacattccatcttttttagtgttctactgtgacaaacagctgcaacaaatatcttcagatatttattttagatatacattttttcctggtcataggggtactattgttagtacaaaagcatatataatttaaaatttaaagaacatttctagattagttcttttagtttgtatcaactcagattaacaagctgtaaacatggcatcctcaacatctttgaatgttatagtcttcaatttcttcaatttacattttgattttcttttttttttcattttgattttctaaggtaatattttttcctggataattttttttagcagaagaaatgtaacttcataaaatacatttttctcttaaataactattagtcttagactctcatttaaaatcaacatctctttttagacatttttggtgtcacttcaaaattaaattgagtttaaggacactaaacaagtgtgtgtttcagttctacagctctgaagtaacttaagaactatttctgccttttgcctgccgaatttttcagttcattaaccaagattgggagggtgttatttttcaaatattcaggaacctctctcaccttctaggattctggaagaagtacacaccctttgaatactgtgattgttccataagattaaactttccaaaagcattgcaaagcactcttatgacttgcctcttaggcctcattacacagcattcaggtgaacaggttcacgatcccacgtgtcataagaggagaaaaaaaatctccagcacaattaaactctttcccatttcatgttactgaattattgcatctgtatttagacttaggccctactggcatgtactggctagttttgtgtcaacttgacacagctggagttatcacagagaaaggagcttcagttggggaaatgcctccatgagatccagctgtaaggcattttctcaattagtgatcaagggggaaaggccccttgtgggtgggaccatctctgggctggtaatcttggttctataagagagcaggctaagcaagccaggggaggcaagccagtaaggaacatccctccatggcctctgcatcagctcctgcttcctgacctgcttgagttccagtcctgacttccttggtgatgaacagcagtctggaagtgtaagccaaataaaccctttcctccccaacttgcttcttggtcatgatgtttgtccaggaataaacaccctgactaagacatggcagttcaaatcactatgcatatgggagaaccagaacctttcaggttgaatgaatgctttcttagccttcaaggggaaaagaaaatgctcagatattttactatgggttcaagcacatgaaggattccatcatgctctcttatgaacatgtccacacataggatttctaatagattagtcaagccttcttggggagagactcatgctgttacctactagtgtttcctgaaagatcttacatccccctttcccagaagttgaaaggtttgtagagatgttttggtaaaaggattctattcttagttaggtagctaccatgggaagtatgtttcattcggggtgctaccatttttaaaatgagctgatcaatcaaatgtaggttattcagaagaaagcaaacatggttgagaacagtgaatttacatttatgggatttagaacatgaagggggacttgtggatttagataacaaagtttggcttggaggaactgccctcatgtatctgttgggcttacccagtgagagggagaagactgtattagaaggccagtttactcactcgaggtatcttttacagtttaagcagacttttctcctttgcaattcttcacaaagatgaacacttgtatatgagtggtttgtccccacatgtgttcagggatactcattcattcaagcactttattgatcacaatatagaacccagggttacaatggtgaatgagacagtatttctacccttgctagcttaaagcttagcagaaataatgttgcaatggagcctacatggttggctgggataagagttatgaaaagaatactggcttggtgatcctttgacattacagcttcttggaccctttccatctctttagttctacatttttgtgactgcttgttctggcctatattgggataaatatcatgaatgtgaacaagaaatttctagcagtaagtataggttataaccttgagaggtaaatttctttttatttcttaagattttatttttatttttaattgtgtgtatgtgtgtttgtgtgtgcacgcacatgctcgcatgcacacatgtgtgtatgtgtatttgtgcatgtgagtgcattgcccccaatggcaaagaaaagatcttgatcctttggagatagagttttacagggttggtgattcatctgacatggattctaggaaccaaacttcagttcgttataataaagttcatgcctttaacatctttctgttccatagaaatggatttcttgatgataaacagtaattattaaaactttggcctcattaatctcattcctgcattacaaagactactaaatgttacaaagtacaaagcttcatgtattgtgtttgtttgttttagacatggtttctctacagagccctggctgtcctggaactcactatgtagaccaagctggccttgaaatttgagagggtgacctgcctctgtgcctgctaactgatgggattaaagatgtgcaccacaaggcttggctccaaacccatgtattttaatttaccttaatggtattcccacctttaaaaagagacacggaatttcttctttatttaagagaaaaagacttaaaaatgaaaggcctactatcatgtatacttaaagtcaccagacctttgctattcatacaaattttcatcaattctgcactgtttttctcacattttaatatttttgaaatgatgaatctgacagttattggtctatagttatcaggtcaatatgtgataatcagctgtattttaataatgaggaaatctgttaatttcctttcaaagctgtctgagtggtgttggtgagatgggtctccacagataggacacttattacaagcccgatggcttgaatttgattcccagaattcacttgaagagggagggtggagagaaccaactccaaaaaagtgtctcttgatgtgccttggcatgtgcacatatatatacatcatgcaaaacataataaaaccataaataaagtctaaaaactttcagtggttactcatttgcttgagcagtagaatttaaatccattaagcctttaattcaaacagacatatattttagcatcacttccaatactgtccttgtaatatctaacaacaaaatcatttatatattttgaacattgattctttgggatgtctgttgacccctcctttggcatctcagataatattttggcattggtataaattaagttactttcttgtcctctgtcttccctgtctgactcctcagtaggaaggtccagttatttactaagcaatttaaagagttaaactaaaaacaattaagttcatgaattaaagtcagctaataacaggttggaagtttgttacattttgattttaatctgattacaagttaatatctgactagaagaaatttattacatgttaatatttaaggttgcatttttttttgtaagtacaaatgagacaggtctggtggaacaccttcattaaaacatgaaatgaatggaaatattagcctttgtttttttatttctgtgatcctggggatggaaccagggccttgtgcttaggaaacacgtgtcctacagtgctagaagctcaccccccccattagccctttaaggatgcaataggaattgaaagtacagaaggagtctaaacatgtatttctcaaagtctggtgcttgtcgttcttctagacttctatcttctcaggtgttttctgtgctgtttctccacggaagcttttcagttctcagaggcttccctttttcttgagggtctttgcacatacatccactattcctggaacatctatatgaacatcatttgggaggatggccaagaatcatttcttcaagatgtccatattaaatattttctgttctgtttctgctacatacccagacaggacactgcaattatcataccatgaaatgcccattgtgaccaagaggtgaccaagtcttcatttgtctctgttgtttcacaaatgctcgacttaaacaaaactccctattgtatttttattatttatttatttattgcattttgagacagggttttattattcagttcaggctggcttaatattcagggttctgcagtctttgcctccggactgctaggattagatgtgttcatcaccaggtatagccccaatattataaaagtgatgtattacttgtaaaaattcagatttatgaaattttaattaaaggtctaaactttcaatacattattgacttcttgcgctcagctttccagtgatctaagtttaaataatcatgaagaaaagagccatgtggagagaaagaggaacaagtgaaaatcctcatcatttcattcaaatccattttacattcatgcaaatgtaacagccagttaaaagaagtaattgtgtggacgtatggctgagagtaactcagaatattaaagccagagaagtctcaccccaaactgaacttattgtatccaatcttccccttccctcttacagtctacatgtttctactctgtacttcacatgttgcttgaagggtaatgtatcttttaattgtgttaacagaaatagaaccataccactttcccatctctctttcttccctagagcccctcctaggcactgtcctttcaatccttcccataccttgtccccattctcaagttgatagccctttccccctatctttattattcttacacacatgtatataagtatgtatatgtgtgtacaaatacatatataaatataacctgctaaatctgtttttgttgttgtttgtgtgtagatgttttaggactgaccactctgcattagatcatcaatattcgataataaggtctcacccctggcagagactaatctctgtccagcagtcaatagttgcttgtgatttcttgcctaggactctaagaaatttaccacttccatgtcatcatgctcattgatactgctcctatttcagttttgtttatgcagtcgtttctaggatagactttcacagcaggcttcatgtactctggctcttagaatctctccttcatgtctcctgtgacattccttggcccagtaatgcaggaggtatgatgtagatgcatctacccattcatgacccattgctctctcaatgtgtgcaattgtggttttctgtgatagtcttcatcttcgtaaagaggggcttctttgatgagaggtggtagccacactcatctgtggatataaggataagatttagaatgtagtaagaaattatgctggtctaacaaagtggtggtagtggactcttatctaaagtccatgacttcactagttttgggaagctagttagctttttagtagcatgcatgatttccctcctgttgagtgggccttaagtctaattagatggctgttagttaccactaagttatgaatgctacttattgcatctttgtggatgtacccagcttttgttccctttagtgagggttaattgcgcgcttggcgtaatcatggtcatagctgtttcctgtgtgaaattgttatccgctcacaattccacacaacatacgagccggaagcataaagtgtaaagcctggggtgcctaatgagtgagctaactcacattaattgcgttgcgctcactgcccgctttccagtcgggaaacctgtcgtgccagctgcattaatgaatcggccaacgcgcggggagaggcggtttgcgtattgggcgctcttccgcttcctcgctcactgactcgctgcgctcggtcgttcggctgcggcgagcggtatcagctcactcaaaggcggtaatacggttatccacagaatcaggggataacgcaggaaagaacatgtgagcaaaaggccagcaaaaggccaggaaccgtaaaaaggccgcgttgctggcgtttttccataggctccgcccccctgacgagcatcacaaaaatcgacgctcaagtcagaggtggcgaaacccgacaggactataaagataccaggcgtttccccctggaagctccc

SEQ ID NO: 26 - DNA, 11370 bp, Artificial Sequence
  Synthetic Plasmid (pBS_CCK_ftTA)
ccattggtgaaggaagacactgagcctaccatgggcttctgaaacttcaatggccactcacagtgacacactttctccaacaagatcacactttctaatccttgtgatcctttcaaatggtcccacttcctatactgacgaagatttcaaatgtatcagcctgtggggaccattcttattcaaaccaccacacatgggtccatctcttccttacttccctacgtgtcagccaagtatttgttcccagaatggagatgccacctatgaatcagagatagccaggctgaagcagagctaggctggaacctctcccttcctctgagacctgtaatcagggagccctactctgcactggggcctgaccactcctcagagcccctaccctcctgctgtctgcctttggctttaataactcttctactaaatgtcttattcagaaggacacaagccttacaatggataactgttccagtttcattctgatgctgtgaatatatatatatatatatatatatatatatatatatatatatatatacaccctaatgataagcagcttagggagaaaggggttcatttggcatgcaatttcaggttatggtccattgtggaggggtgtggaggggaagttaagacaggagcctgaagcaggtcacagctcatccacagtcaagagcagagatcaatgcacacaccattgcttgcttgtgctcggctcaatttcttcatgcttacgctgttcaggatccctgcctagggaatggtgccacccatggtggacttggtcttcccatatccgttaataaccaatacaatccccacagacatagcaacagatcaacctgctctagataattcttcagttgaggttcccttcccaagtgacttgaggttgtaccaagctgatggctaaaaattaacccacagaatggttaagtcactgttcctgtattgggacacattggtgaaacacttctataaaagaaataggtactgaggacattctatacattaagctctatgggaaattaaggtaaaatctgataaacactgcatttacagtgtcagacaggtgaggctgttctgccccgggtccctcggatgcccctcaggccttagaatggcaatgtctgtgcctcctcccagttgtttgcagccatgggtctctcagaagagctggatcatggacaccctagagactgctctcagagggggcaggctggagacggtgagcaccccggctctctctttccctcaaggacataaaaaacatttacatattgccctccctgtaccccagcacaacaagcctcacatatgtgtccccttctcactgtccgttacacctgtgggtgtaaaaacactgttctgtcctcaaggacgtgagagagggtttattctggagcaaagatgaatgaccacgggctctgggctctgtctagggaatgcagattcagatcacagtgtcagaacaaacactgcagacgcattgctggggaacactgggtaggcagttcagagccaagcaggaaagtttctgcatagacctcggctgctacctgatggcatccttagcctttggttggtggaagctagaagtcggtcaggttaatataccccaagtatttttacctgtcagtcacaaggacgttaggtcagatgcagggaggtgggtgagatgaatggggctctgaatgatggcctagcggaaacataacagggctctggaccttcaacaccatcactgtcatcctgctcaggtgtcagcttggcagaaggtttggtggaaggtaccgctctcccaggaacttgttcacaggctctccctggggttttccccattcactgttgcttgaatgaactggattctcttcaaagtctccccagattgaggattcctcgcttccacaccagcttcatagaaatcccagggaaacaacaaaataagcttctgtggttgtttttgtttgagacgggtttcatgtaacccaggctgtgtaacccaggctggccacacacatgtacatgatcacacacatacgcacacacacacacatgctatataggcaaggaagaccttgaacccccgatcttcccagcttcgtctctctaatgctggggctgtgggtgtccatcagcacacctggcatgaacaactgaaagcttttctaacttgtgggagttttctatgtcaagcactgaccatgttttaaaattccctccccactgacatactgagtgggggggggcactttggaagtgaccaggtcacggatgcttctgctaatgtgaaatgtgccctttaagaatagactatcttgggccagagagatggcgcagctgtcaagagcactcgttgcttttgcagaggacctgtgtttgattcctacatggcggttcacaaccatctgtaacttcggttccagaccatatgacatcctgtcctgacctccttaaccaccaggcactcacgtggcacacagatatacctgcaggcaaaatactcataatcataaaacaaaaataaaaaaataaaaaaacagacttccatctgtcacctgaggtacagcaggtagctgtagccaagcagagtcctcagcaggtcccacacctttctggtcctggaattcccagcctctggcttccaggaactcactttctgctcagccactggtctatggtgttttgtcctaccagcttagatgactaacagacaaggctgccttcctggctgtcaaggaggtggctgtgagctactttccaaggggaatgtcagagtccagaagcaaagaactcactattcacgtgtactggttctttctcccttgcctcttccctcagtcctgatttctgggatccatccaaggtcatcttccacccctagatgtctgtcctgggttctgcctctgtaggaacccaaatggaggcaaagtatcctaagggagctctcacaggaaaagtgggcactgcccccaaagccaggactgctcccttctttcttgttaagttatttcagataaagtctgatgaccatgcccaaggatcttataaaagtgtcagggtatagtcaggccagtattctgaatcgtggccagaggaactctgccttgcagcaaaggtggcagagcatacctttccacactaggcattttttcctgaggtgaacagaaaccctgataaggactgagtacacgaaagtgtaactgtctctgagtcctactaggttgtgtgagcctgtgctcacatccaccactatgacactggacaactctctgggcccaggtttatgtcaatgtggctgcagatgtagggcaggataaaacaagagcctgctgggcagggtcatgcagccactccgagtcacccacactctcaataaacccaataacttcagttatttcgccaagctggactggacagaggctctctttggtcggtctgcaccccctttactgggatgaatatgagactcaccagacaggggtttggatgtgaatgaccgaggtaaacctgaacctgtagtcagcagccaaatctcccccagaggtcagcacatcccctgttaagtgcctcgaagctgcagttgggttgtgactaagctccatcagaaaggacggaccagttgctcagtcagcacaggtgtgtgctgaccaaaggtcgccacccttgttataatatcttttacatcacagtttagacctctatcccttgtggggttttctagagaatcatgagaagaaatatcctacaaaacagatcttgtttacatgatttgggagaggaagggggtcattttcctccatacacatgacacttacatcataaatattcattaaaaaacacctttgaaagccatggtggaaaagtcactgtgctctgcctactcgtggcacagcccagcccagtaaacatttccctcagcttcactaagtacgcttcttacactgtctctttttccaactggatcccttccctctagaagataggagttggaagacccacgtaataaacagacacttgatttgtgtcccaggaaaccacacaacaaattaccatttctaaaatacgttcaggagaaaagaagccctcaagacctaaaacagacgcctttcctaaaaccgatgccttcgtggatacagcagacagcttcttgacctccactaaacaggatgagcggtggcaagcagaaatccaatgaataataaatcaggttcctgcttgtccctcgatgcctcactaagcttcctacactgtgaaatggactcgtgttgttgagaggcctctcatgactggaaaagccctttgttgaaaatgtcatgaatttcccagcactgaatgagatatcatttaacattataattttttaaagatccatttgtcttattttatgtatgcaggtgttctgcatggatggatggatggatgggtgggtggatggaaggatggatggatggatgggtggatggatggatggatggatgggtgggtggcacatgcatgcagtgcctgaggaatcagaagagggtgtcagatcccctgcaactggggtaacagttggctgtgagccaccatgtggattctgggaagcaaacctggctcctctgtaagagcaacaagcactcttaactgctcagccatctctccagtttgtccttcaacattttaatcaccaaaaccagaattaaattcctagattcccaaatcggccaacagtcagatttctcctcgtcacttcttccttttttaattagatattttctttattttcacttcaaatattatcccctttcctagtttcccccctgaaaatcccctatctcctcccccctccccctgctccccagcccacctacccactcccattcccagtcctggccttcccctatactggagcatagaaccttcacaggaccaagggcctctcctcccatcgatgaccgaataggccatcctcagctacatatgcagctagagccacaagttccaccatgtgttttctttgattggtggttttggttccaaggagctctgggggtactggttagttcatattgttgttcctcctatggggcttcagaccccttcaactccttgggtactttctctagctccttcattggggaccttgtgctcctggcaaatacagaagtgaatgctcacaatcgtccattggacggacagagcacaaggttactttttcctttcaaatataacatccggacaagatgttggcagtcctccattggggacagaaagggtccaccaaggaggagttctgggctcttaatgtggagtctggggcaggggtggggcgcagtggagactacatagtggacactacctttttcatcctgttccagagagcaactcgagggaggacttattttggtttgtggttaaagggagacaggccatcatggtggggaagactaacagcagggagctttgtgacagcagcagaatagggctggacctcctacctgctcacacctccgtgggacaggaagccaagacagcaagtgaggcctggcaatcaacctccaggcctgctccaatgagccactttctcccataaggctgtagcttctaagggttccacaacctctcagaacaaccccactagctgggaccaagtgttctaacatgagagagaatctcacattcaaacaaatctgctaccatctctcagcagatgaaacacaatacaacccacaaccaagacacaaccccttctttatgtgggcagataagctatcccccttcccttctaagcatacagggagctcacacaccaaagatccccgagaagggtcctccagcaggccttcctatgcattcaagcaaacttgccacccagccatctccaacctctgcccacttccgtgtacccatccaggaccatcacacatgcaacttatcttccctgcttgctgtctttctcttccacatctctcctgctacagtggatgtgtatattgttcaccgtgaccctctacggcacctgcagacagctggtgttctcagcatggttatactgagatgagactgatggggcgagaggtgatctcagggaacagaagtgaggaagtgaggaccaggagaagctagttagagatgctatcagggttactgctggagcaaaggacctttgagaagtttccagaagtttctagaatgttccattgcagaactgggtttttccatccttactggcttaggttaggcctctggggagcaacatcgtcatttataggaataaagcttgaaggaagagaagtggagttccagtgtatatgtgtgtgtgtgtgtgtgtgtgtgtgtgtgtgtgtgtgtgtaaaattagagtggggagaggaacatagagcaaggacattgtctcaaaaatcaactgcttcaggggcattaaactaatacaagagaaacgcaagccccagcctctcttgctgctaaaggtcatactcagaattactgttcctgccgggcatggtggtgcacgcctttaatcccagcactcgggaggcagaggcaggtagatttctgagttcgaggccagcctggtctacaaagtgagttccaggacagccagggctatacagagaaaacctgtctcgaaaaacaaaacaaaacaaaacaaaacaaaacaaaattactgttcttgcctcagctgcttggaggaacctcactgaatcactatggccatagaatccaggctccacctattttccatcagtcctacccagaattcccagggaagatgaagaaaccatggctacaatattttattaaataaagagtccattgtgccaccttcttccagcttctaactgtccttgacacctttggcttctcctggtggcttttctactctggcctttgaccctgcctgtggtcaggtgctggacccttctcccgttccttcctctggctgtcacacctgggaatctgggcagagatgccttttctcttccctcgcttcccaccttttgagtctcttcctacagcttccaggtgggaagccaccatctacagaaagagtcttgggttgtacctccagtgtccctctgtccaggacttgagatcacaaccttctctagctgtccacccataacctggattcatcccccacgccccgccagacacacaccagttggtgtgttttcttctgaactccccctgtggccaatacactcccacccacccttgtctctcagcccagaacttcacagtcagccccagacacggagtacctttgggtttcttgaagagcaagatgctgcttccatgcctggaagtttctgcttatgtctactgttctagctattcggatgttctattgtaggcacttaggactcgtatagtgtctgctacatttcatgatagtgaataaatttcacaaaagcatattaggcttcctataaatctgtcctcattcctcaatggccctcccatctcctgtcttcctaacctgtcctggtctcccgtgtctgccctagggacacctccatgtcaccaccagactcagtggaaatccttactccgcccttggctattagtgcagatctgaactcagttccttgtacttgcaggcaagcacttcactggctgagccgcctcccagttccagctccaggcccccggctcccaaaggtgtttatttgtgtgggtatttattttgtccagtcttggtcacaccgcatcctcaggggctgggcacagttcataaatcttgaggcaagcgatggagggaaggaggcagctaagcgtccatatctcagccaccgacccagggaagtcagcgcctgtggattctgaccatatcgaacagccttgtgcccagctgctttatccacaattccggacatgctcgatctgtcacagatacattcccacaacctgagctgtcttgtgcgggaaatcaccccacagcatttaatctgttgctgtttaaaacatgttgcctctaggttgcagacaccgctagagccacaaccatgaacctaaactcttggcatcacttgctgtttctcatagtccccctcagccggaagtccccaaactgtgtgccttttctatttagaaagagtttctaaccctttctccattcaccctagcttgacagggttgagggcatggttgccctggctggtggtgaccccaagttacaagctagcagcaaggaggttgctgtggggcttcctcagtatgtgttctgtggaatggggttagagggattcagcaaattctagcaccctgggcatagataatcactttgttatgtgagaactgggggttgcaggattgtgcgcactacagcagagagagccccctctctccttcttgcttggtaagagtctttttctcagccaagatcctcatcacccagcgaaatcccataactttagagggactagactggaaagggtgatctgagctcttgggaaggtgcgagcccagcccgcatggctcagccagccagagcttgggagtgcctgagacactctctggcgccacttcacgaccaaaagcatcagtagatgataggcccctgggaagtcgtcgtggaaagaaattacaaatctttttcccagaggcttttcgcagaaaggcaggagctgcacccgatcttacaattgtgtaagaatagaatccaggatgccaactgcaattgagttctgaaaaattgggagcccgatttccctctcttacttgtgagagcccactcaggtctgaggtggtcccagagaacacaccaggattacatctgctgacacccagcctgtgagggtcccccagtttccttgaaggatttgatccccaaagctcactgaacttggtcagcttctccattgcagataaactcctgtttttcaccgagagtggaggtggcaccctccctgaggtggactctgcacaggcgccgaacaggtgggaaggaagctctttagataaagagtaagacccatgcaaagtgcccccctgggaggggctatcctcattcactgggacgcttcccttctctccggagggccacatcaatcggtggtccctccagtggctgcctctgagcacgtgtcctgctggactgcgtcagcactgggtaaacagatgactggctgcgaaccgggaggagctatttaagagcagtcaccctcccgcctgccctcaacttagctggactgcagccttctccgctggaactcgccaagccagctgatttccccatccaaaggtaagtagctggctgatccaacaatcttgagtgtgaagaatattggcctgcagctttgcacctcttgctgtttagtctttcctttttctgtgccttccctcccttgacagctagaaagatttcctgaagtcagaaatagccttaaaatgcatctgggtgggtactgctgcggagagacttgttgtatgttctgtttacagcaaggctgggaatagccactcttagggtttctctgctgttcggagcactttgcaatcatttaaaagaaactacctagaggtttaaagatttatgcccattttctaaatgctgcattaaaaaaattttaaggctttggggaataaaaacacatcattatgatacagcacccatctgctcagttctcaagtgtagcagggctttggccacatctgaggactgggcacagatttctggcttttgctttgtatagtgacttcccgtaaaacgcagaagaatctatataaatacagcttctttttatgggcccacacttaaaacggcgtttcccagtgtcctgacatttttaatgtagtgaataaatttaatctctcacatttctctccagaagtatcctccccgtgtttgtctgtccgtttgtctttctgtgtctctctctgtctctctgactctctctctctctctctctctctctctctctctctctctcacacacacacacacacacacacacacacacacacacacacacacgcttcattctgcttttctggttagaagagagatgagctacaaaggcgtcctggaacttcaggaaagcaagaggaaacgctgcttctgatcagggcagaaaaatcgggactctgcgggattcccaggtcccaggtgtggataacacaaaagccaggcagaaattatcgcggtggccagggcgcatctaggaacttcgcttggctacggttgagccagtctgacccggctgcagcccccatgttcagcctcagccgacttctgtgtgcgggactttgggctggagcacgctgaggccggccataacttcgtatagcatacattatacgaagttatgtttaaacaccctgcaggaggggcccacaagcttgatatcgaattcatatgtctagattagataaaagtaaagtgattaacagcgcattagagctgcttaatgaggtcggaatcgaaggtttaacaacccgtaaactcgcccagaagctaggtgtagagcagcctacattgtattggcatgtaaaaaataagcgggctttgctcgacgccttagccattgagatgttagataggcaccatactcacttttgccctttagaaggggaaagctggcaagattttttacgtaataacgctaaaagttttagatgtgctttactaagtcatcgcgatggagcaaaagtacatttaggtacacggcctacagaaaaacagtatgaaactctcgaaaatcaattagcctttttatgccaacaaggtttttcactagagaatgcattatatgcactcagcgctgtggggcattttactttaggttgcgtattggaagatcaagagcatcaagtcgctaaagaagaaagggaaacacctactactgatagtatgccgccattattacgacaagctatcgaattatttgatcaccaaggtgcagagccagccttcttattcggccttgaattgatcatatgcggattagaaaaacaacttaaatgtgaaagtgggtccgcgtacagccgcgcgcgtacgaaaaacaattacgggtctaccatcgagggcctgctcgatctcccggacgacgacgcccccgaagaggcggggctggcggctccgcgcctgtcctttctccccgcgggacacacgcgcagactgtcgacggcccccccgaccgatgtcagcctgggggacgagctccacttagacggcgaggacgtggcgatggcgcatgccgacgcgctagacgatttcgatctggacatgttgggggacggggattccccgggtccgggatttaccccccacgactccgccccctacggcgctctggatatggccgacttcgagtttgagcagatgtttaccgatgcccttggaattgacgagtacggtgggtagggggcgcgaggatccactag

SEQ ID NO: 27 - DNA, 12749 bp, Artificial Sequence
  Synthetic Plasmid (pBS_CCK_fSTOPtTA)
ccattggtgaaggaagacactgagcctaccatgggcttctgaaacttcaatggccactcacagtgacacactttctccaacaagatcacactttctaatccttgtgatcctttcaaatggtcccacttcctatactgacgaagatttcaaatgtatcagcctgtggggaccattcttattcaaaccaccacacatgggtccatctcttccttacttccctacgtgtcagccaagtatttgttcccagaatggagatgccacctatgaatcagagatagccaggctgaagcagagctaggctggaacctctcccttcctctgagacctgtaatcagggagccctactctgcactggggcctgaccactcctcagagcccctaccctcctgctgtctgcctttggctttaataactcttctactaaatgtcttattcagaaggacacaagccttacaatggataactgttccagtttcattctgatgctgtgaatatatatatatatatatatatatatatatatatatatatatatatacaccctaatgataagcagcttagggagaaaggggttcatttggcatgcaatttcaggttatggtccattgtggaggggtgtggaggggaagttaagacaggagcctgaagcaggtcacagctcatccacagtcaagagcagagatcaatgcacacaccattgcttgcttgtgctcggctcaatttcttcatgcttacgctgttcaggatccctgcctagggaatggtgccacccatggtggacttggtcttcccatatccgttaataaccaatacaatccccacagacatagcaacagatcaacctgctctagataattcttcagttgaggttcccttcccaagtgacttgaggttgtaccaagctgatggctaaaaattaacccacagaatggttaagtcactgttcctgtattgggacacattggtgaaacacttctataaaagaaataggtactgaggacattctatacattaagctctatgggaaattaaggtaaaatctgataaacactgcatttacagtgtcagacaggtgaggctgttctgccccgggtccctcggatgcccctcaggccttagaatggcaatgtctgtgcctcctcccagttgtttgcagccatgggtctctcagaagagctggatcatggacaccctagagactgctctcagagggggcaggctggagacggtgagcaccccggctctctctttccctcaaggacataaaaaacatttacatattgccctccctgtaccccagcacaacaagcctcacatatgtgtccccttctcactgtccgttacacctgtgggtgtaaaaacactgttctgtcctcaaggacgtgagagagggtttattctggagcaaagatgaatgaccacgggctctgggctctgtctagggaatgcagattcagatcacagtgtcagaacaaacactgcagacgcattgctggggaacactgggtaggcagttcagagccaagcaggaaagtttctgcatagacctcggctgctacctgatggcatccttagcctttggttggtggaagctagaagtcggtcaggttaatataccccaagtatttttacctgtcagtcacaaggacgttaggtcagatgcagggaggtgggtgagatgaatggggctctgaatgatggcctagcggaaacataacagggctctggaccttcaacaccatcactgtcatcctgctcaggtgtcagcttggcagaaggtttggtggaaggtaccgctctcccaggaacttgttcacaggctctccctggggttttccccattcactgttgcttgaatgaactggattctcttcaaagtctccccagattgaggattcctcgcttccacaccagcttcatagaaatcccagggaaacaacaaaataagcttctgtggttgtttttgtttgagacgggtttcatgtaacccaggctgtgtaacccaggctggccacacacatgtacatgatcacacacatacgcacacacacacacatgctatataggcaaggaagaccttgaacccccgatcttcccagcttcgtctctctaatgctggggctgtgggtgtccatcagcacacctggcatgaacaactgaaagcttttctaacttgtgggagttttctatgtcaagcactgaccatgttttaaaattccctccccactgacatactgagtgggggggggcactttggaagtgaccaggtcacggatgcttctgctaatgtgaaatgtgccctttaagaatagactatcttgggccagagagatggcgcagctgtcaagagcactcgttgcttttgcagaggacctgtgtttgattcctacatggcggttcacaaccatctgtaacttcggttccagaccatatgacatcctgtcctgacctccttaaccaccaggcactcacgtggcacacagatatacctgcaggcaaaatactcataatcataaaacaaaaataaaaaaataaaaaaacagacttccatctgtcacctgaggtacagcaggtagctgtagccaagcagagtcctcagcaggtcccacacctttctggtcctggaattcccagcctctggcttccaggaactcactttctgctcagccactggtctatggtgttttgtcctaccagcttagatgactaacagacaaggctgccttcctggctgtcaaggaggtggctgtgagctactttccaaggggaatgtcagagtccagaagcaaagaactcactattcacgtgtactggttctttctcccttgcctcttccctcagtcctgatttctgggatccatccaaggtcatcttccacccctagatgtctgtcctgggttctgcctctgtaggaacccaaatggaggcaaagtatcctaagggagctctcacaggaaaagtgggcactgcccccaaagccaggactgctcccttctttcttgttaagttatttcagataaagtctgatgaccatgcccaaggatcttataaaagtgtcagggtatagtcaggccagtattctgaatcgtggccagaggaactctgccttgcagcaaaggtggcagagcatacctttccacactaggcattttttcctgaggtgaacagaaaccctgataaggactgagtacacgaaagtgtaactgtctctgagtcctactaggttgtgtgagcctgtgctcacatccaccactatgacactggacaactctctgggcccaggtttatgtcaatgtggctgcagatgtagggcaggataaaacaagagcctgctgggcagggtcatgcagccactccgagtcacccacactctcaataaacccaataacttcagttatttcgccaagctggactggacagaggctctctttggtcggtctgcaccccctttactgggatgaatatgagactcaccagacaggggtttggatgtgaatgaccgaggtaaacctgaacctgtagtcagcagccaaatctcccccagaggtcagcacatcccctgttaagtgcctcgaagctgcagttgggttgtgactaagctccatcagaaaggacggaccagttgctcagtcagcacaggtgtgtgctgaccaaaggtcgccacccttgttataatatcttttacatcacagtttagacctctatcccttgtggggttttctagagaatcatgagaagaaatatcctacaaaacagatcttgtttacatgatttgggagaggaagggggtcattttcctccatacacatgacacttacatcataaatattcattaaaaaacacctttgaaagccatggtggaaaagtcactgtgctctgcctactcgtggcacagcccagcccagtaaacatttccctcagcttcactaagtacgcttcttacactgtctctttttccaactggatcccttccctctagaagataggagttggaagacccacgtaataaacagacacttgatttgtgtcccaggaaaccacacaacaaattaccatttctaaaatacgttcaggagaaaagaagccctcaagacctaaaacagacgcctttcctaaaaccgatgccttcgtggatacagcagacagcttcttgacctccactaaacaggatgagcggtggcaagcagaaatccaatgaataataaatcaggttcctgcttgtccctcgatgcctcactaagcttcctacactgtgaaatggactcgtgttgttgagaggcctctcatgactggaaaagccctttgttgaaaatgtcatgaatttcccagcactgaatgagatatcatttaacattataattttttaaagatccatttgtcttattttatgtatgcaggtgttctgcatggatggatggatggatgggtgggtggatggaaggatggatggatggatgggtggatggatggatggatggatgggtgggtggcacatgcatgcagtgcctgaggaatcagaagagggtgtcagatcccctgcaactggggtaacagttggctgtgagccaccatgtggattctgggaagcaaacctggctcctctgtaagagcaacaagcactcttaactgctcagccatctctccagtttgtccttcaacattttaatcaccaaaaccagaattaaattcctagattcccaaatcggccaacagtcagatttctcctcgtcacttcttccttttttaattagatattttctttattttcacttcaaatattatcccctttcctagtttcccccctgaaaatcccctatctcctcccccctccccctgctccccagcccacctacccactcccattcccagtcctggccttcccctatactggagcatagaaccttcacaggaccaagggcctctcctcccatcgatgaccgaataggccatcctcagctacatatgcagctagagccacaagttccaccatgtgttttctttgattggtggttttggttccaaggagctctgggggtactggttagttcatattgttgttcctcctatggggcttcagaccccttcaactccttgggtactttctctagctccttcattggggaccttgtgctcctggcaaatacagaagtgaatgctcacaatcgtccattggacggacagagcacaaggttactttttcctttcaaatataacatccggacaagatgttggcagtcctccattggggacagaaagggtccaccaaggaggagttctgggctcttaatgtggagtctggggcaggggtggggcgcagtggagactacatagtggacactacctttttcatcctgttccagagagcaactcgagggaggacttattttggtttgtggttaaagggagacaggccatcatggtggggaagactaacagcagggagctttgtgacagcagcagaatagggctggacctcctacctgctcacacctccgtgggacaggaagccaagacagcaagtgaggcctggcaatcaacctccaggcctgctccaatgagccactttctcccataaggctgtagcttctaagggttccacaacctctcagaacaaccccactagctgggaccaagtgttctaacatgagagagaatctcacattcaaacaaatctgctaccatctctcagcagatgaaacacaatacaacccacaaccaagacacaaccccttctttatgtgggcagataagctatcccccttcccttctaagcatacagggagctcacacaccaaagatccccgagaagggtcctccagcaggccttcctatgcattcaagcaaacttgccacccagccatctccaacctctgcccacttccgtgtacccatccaggaccatcacacatgcaacttatcttccctgcttgctgtctttctcttccacatctctcctgctacagtggatgtgtatattgttcaccgtgaccctctacggcacctgcagacagctggtgttctcagcatggttatactgagatgagactgatggggcgagaggtgatctcagggaacagaagtgaggaagtgaggaccaggagaagctagttagagatgctatcagggttactgctggagcaaaggacctttgagaagtttccagaagtttctagaatgttccattgcagaactgggtttttccatccttactggcttaggttaggcctctggggagcaacatcgtcatttataggaataaagcttgaaggaagagaagtggagttccagtgtatatgtgtgtgtgtgtgtgtgtgtgtgtgtgtgtgtgtgtgtgtaaaattagagtggggagaggaacatagagcaaggacattgtctcaaaaatcaactgcttcaggggcattaaactaatacaagagaaacgcaagccccagcctctcttgctgctaaaggtcatactcagaattactgttcctgccgggcatggtggtgcacgcctttaatcccagcactcgggaggcagaggcaggtagatttctgagttcgaggccagcctggtctacaaagtgagttccaggacagccagggctatacagagaaaacctgtctcgaaaaacaaaacaaaacaaaacaaaacaaaacaaaattactgttcttgcctcagctgcttggaggaacctcactgaatcactatggccatagaatccaggctccacctattttccatcagtcctacccagaattcccagggaagatgaagaaaccatggctacaatattttattaaataaagagtccattgtgccaccttcttccagcttctaactgtccttgacacctttggcttctcctggtggcttttctactctggcctttgaccctgcctgtggtcaggtgctggacccttctcccgttccttcctctggctgtcacacctgggaatctgggcagagatgccttttctcttccctcgcttcccaccttttgagtctcttcctacagcttccaggtgggaagccaccatctacagaaagagtcttgggttgtacctccagtgtccctctgtccaggacttgagatcacaaccttctctagctgtccacccataacctggattcatcccccacgccccgccagacacacaccagttggtgtgttttcttctgaactccccctgtggccaatacactcccacccacccttgtctctcagcccagaacttcacagtcagccccagacacggagtacctttgggtttcttgaagagcaagatgctgcttccatgcctggaagtttctgcttatgtctactgttctagctattcggatgttctattgtaggcacttaggactcgtatagtgtctgctacatttcatgatagtgaataaatttcacaaaagcatattaggcttcctataaatctgtcctcattcctcaatggccctcccatctcctgtcttcctaacctgtcctggtctcccgtgtctgccctagggacacctccatgtcaccaccagactcagtggaaatccttactccgcccttggctattagtgcagatctgaactcagttccttgtacttgcaggcaagcacttcactggctgagccgcctcccagttccagctccaggcccccggctcccaaaggtgtttatttgtgtgggtatttattttgtccagtcttggtcacaccgcatcctcaggggctgggcacagttcataaatcttgaggcaagcgatggagggaaggaggcagctaagcgtccatatctcagccaccgacccagggaagtcagcgcctgtggattctgaccatatcgaacagccttgtgcccagctgctttatccacaattccggacatgctcgatctgtcacagatacattcccacaacctgagctgtcttgtgcgggaaatcaccccacagcatttaatctgttgctgtttaaaacatgttgcctctaggttgcagacaccgctagagccacaaccatgaacctaaactcttggcatcacttgctgtttctcatagtccccctcagccggaagtccccaaactgtgtgccttttctatttagaaagagtttctaaccctttctccattcaccctagcttgacagggttgagggcatggttgccctggctggtggtgaccccaagttacaagctagcagcaaggaggttgctgtggggcttcctcagtatgtgttctgtggaatggggttagagggattcagcaaattctagcaccctgggcatagataatcactttgttatgtgagaactgggggttgcaggattgtgcgcactacagcagagagagccccctctctccttcttgcttggtaagagtctttttctcagccaagatcctcatcacccagcgaaatcccataactttagagggactagactggaaagggtgatctgagctcttgggaaggtgcgagcccagcccgcatggctcagccagccagagcttgggagtgcctgagacactctctggcgccacttcacgaccaaaagcatcagtagatgataggcccctgggaagtcgtcgtggaaagaaattacaaatctttttcccagaggcttttcgcagaaaggcaggagctgcacccgatcttacaattgtgtaagaatagaatccaggatgccaactgcaattgagttctgaaaaattgggagcccgatttccctctcttacttgtgagagcccactcaggtctgaggtggtcccagagaacacaccaggattacatctgctgacacccagcctgtgagggtcccccagtttccttgaaggatttgatccccaaagctcactgaacttggtcagcttctccattgcagataaactcctgtttttcaccgagagtggaggtggcaccctccctgaggtggactctgcacaggcgccgaacaggtgggaaggaagctctttagataaagagtaagacccatgcaaagtgcccccctgggaggggctatcctcattcactgggacgcttcccttctctccggagggccacatcaatcggtggtccctccagtggctgcctctgagcacgtgtcctgctggactgcgtcagcactgggtaaacagatgactggctgcgaaccgggaggagctatttaagagcagtcaccctcccgcctgccctcaacttagctggactgcagccttctccgctggaactcgccaagccagctgatttccccatccaaaggtaagtagctggctgatccaacaatcttgagtgtgaagaatattggcctgcagctttgcacctcttgctgtttagtctttcctttttctgtgccttccctcccttgacagctagaaagatttcctgaagtcagaaatagccttaaaatgcatctgggtgggtactgctgcggagagacttgttgtatgttctgtttacagcaaggctgggaatagccactcttagggtttctctgctgttcggagcactttgcaatcatttaaaagaaactacctagaggtttaaagatttatgcccattttctaaatgctgcattaaaaaaattttaaggctttggggaataaaaacacatcattatgatacagcacccatctgctcagttctcaagtgtagcagggctttggccacatctgaggactgggcacagatttctggcttttgctttgtatagtgacttcccgtaaaacgcagaagaatctatataaatacagcttctttttatgggcccacacttaaaacggcgtttcccagtgtcctgacatttttaatgtagtgaataaatttaatctctcacatttctctccagaagtatcctccccgtgtttgtctgtccgtttgtctttctgtgtctctctctgtctctctgactctctctctctctctctctctctctctctctctctctctcacacacacacacacacacacacacacacacacacacacacacacgcttcattctgcttttctggttagaagagagatgagctacaaaggcgtcctggaacttcaggaaagcaagaggaaacgctgcttctgatcagggcagaaaaatcgggactctgcgggattcccaggtcccaggtgtggataacacaaaagccaggcagaaattatcgcggtggccagggcgcatctaggaacttcgcttggctacggttgagccagtctgacccggctgcagcccccatgttcagcctcagccgacttctgtgtgcgggactttgggctggagcacgctgaggccggccataacttcgtatagcatacattatacgaagttatgtttaaacacccctcggggacaccaaatatggcgatctcggccttttcgtttcttggagctgggacatgtttgccatcgatccatctaccaccagaacggccgttagatctgctgccaccgttgtttccaccgaagaaaccaccgttgccgtaaccaccacgacggttgttgctaaagaagctgccaccgccacggccaccgttgtagccgccgttgttgttattgtagttgctcatgttatttctggcacttcttggttttcctcttaagtgaggaggaacataaccattctcgttgttgtcgttgatgcttaaattttgcacttgttcgctcagttcagccataatatgaaatgcttttcttgttgttcttacggaataccacttgccacctatcaccacaactaactttttcccgttcctccatctcttttatattttttttctcgagggatctttgtgaaggaaccttacttctgtggtgtgacataattggacaaactacctacagagatttaaagctctaaggtaaatataaaatttttaagtgtataatgtgttaaactactgattctaattgtttgtgtattttagattccaacctatggaactgatgaatgggagcagtggtggaatgcctttaatgaggaaaacctgttttgctcagaagaaatgccatctagtgatgatgaggctactgctgactctcaacattctactcctccaaaaaagaagagaaaggtagaagaccccaaggactttccttcagaattgctaagttttttgagtcatgctgtgtttagtaatagaactcttgcttgctttgctatttacaccacaaaggaaaaagctgcactgctatacaagaaaattatggaaaaatattctgtaacctttataagtaggcataacagttataatcataacatactgttttttcttactccacacaggcatagagtgtctgctattaataactatgctcaaaaattgtgtacctttagctttttaatttgtaaaggggttaataaggaatatttgatgtatagtgccttgactagagatcataatcagccataccacatttgtagaggttttacttgctttaaaaaacctcccacacctccccctgaacctgaaacataaaatgaatgcaattgttgttgttaacttgtttattgcagcttataatggttacaaataaagcaatagcatcacaaatttcacaaataaagcatttttttcactgcattctagttgtggtttgtccaaactcatcaatgtatcttatcatgtctggatctgacatggtaagtaagcttgggctgcaggtcgagggacctaataacttcgtatagcatacattatacgaagttatattaagggttccggatcggaggggcccacaagcttgatatcgaattcatatgtctagattagataaaagtaaagtgattaacagcgcattagagctgcttaatgaggtcggaatcgaaggtttaacaacccgtaaactcgcccagaagctaggtgtagagcagcctacattgtattggcatgtaaaaaataagcgggctttgctcgacgccttagccattgagatgttagataggcaccatactcacttttgccctttagaaggggaaagctggcaagattttttacgtaataacgctaaaagttttagatgtgctttactaagtcatcgcgatggagcaaaagtacatttaggtacacggcctacagaaaaacagtatgaaactctcgaaaatcaattagcctttttatgccaacaaggtttttcactagagaatgcattatatgcactcagcgctgtggggcattttactttaggttgcgtattggaagatcaagagcatcaagtcgctaaagaagaaagggaaacacctactactgatagtatgccgccattattacgacaagctatcgaattatttgatcaccaaggtgcagagccagccttcttattcggccttgaattgatcatatgcggattagaaaaacaacttaaatgtgaaagtgggtccgcgtacagccgcgcgcgtacgaaaaacaattacgggtctaccatcgagggcctgctcgatctcccggacgacgacgcccccgaagaggcggggctggcggctccgcgcctgtcctttctccccgcgggacacacgcgcagactgtcgacggcccccccgaccgatgtcagcctgggggacgagctccacttagacggcgaggacgtggcgatggcgcatgccgacgcgctagacgatttcgatctggacatgttgggggacggggattccccgggtccgggatttaccccccacgactccgccccctacggcgctctggatatggccgacttcgagtttgagcagatgtttaccgatgcccttggaattgacgagtacggtgggtagggggcgcgaggatccactag
